(19) United States
(12) Patent Application Publication
(10) Pub. No.: US 2022/0251609 A1
(43) Pub. Date: Aug. 11, 2022

(54) MICROORGANISMS WITH IMPROVED NITROGEN TRANSPORT FOR ETHANOL PRODUCTION

(71) Applicant: Novozymes A/S, Bagsvaerd (DK)

(72) Inventors: Hamid Rismani Yazdi, Raleigh, US (US); Sarah Schultheis Elliott, Raleigh, NC (US); Paul Vincent Harris, Carnation, WA (US); Michael Glenn Catlett, West Sacramento, CA (US)

(73) Assignee: Novozymes A/S, Bagsvaerd (DK)

(21) Appl. No.: 17/615,795

(22) PCT Filed: Jul. 16, 2020
(86) PCT No.: PCT/US2020/042384

§ 371 Date: Dec. 1, 2021

Related U.S. Application Data
(60) Provisional application No. 62/879,307, filed on Jul. 26, 2019.

(51) Int. Cl. C12P 7/10; C12N 9/00

(52) U.S. Cl. CPC C12P 7/10; C12N 9/00

(57) ABSTRACT

Described herein are fermention organisms, such as yeasts, comprising a genetic modification that increases or decreases expression of a transporter or regulator thereof, such as yeasts that express an Amino Acid/Auxin Permease (AAAP). Also described are processes for producing a fermentation product, such as ethanol, from starch or cellulosic-containing material with the fermenting organisms.

### REFERENCE TO A SEQUENCE LISTING

[0001] This application contains a Sequence Listing in computer readable form, which is incorporated herein by reference.

### BACKGROUND

[0002] Production of ethanol from starch and cellulosic containing materials is well-known in the art.

[0003] The most commonly industrially used commercial process for starch-containing material, often referred to as a “conventional process”, includes liquefying gelatinized starch at high temperature (about 85° C.) using typically a bacterial alpha-amylase, followed by simultaneous saccharification and fermentation (SSF) carried out anaerobically in the presence of typically a glucoamylase and a Saccharomyces cerevisae yeast.

[0004] There are several processes in the art for saccharification of cellulose and hemicelluloses, and for fermentation of hydrolysates containing glucose, mannose, xylose and arabinose. Glucose and mannose are efficiently converted to ethanol during natural anaerobic metabolism. To obtain an economically relevant process at industrial scale, advances have been made to improve fermentation xylose within the hydrolysates.

[0005] Yeasts which are used for production of ethanol for use as fuel, such as in the corn ethanol industry, require several characteristics to ensure cost effective production of the ethanol. These characteristics include ethanol tolerance, low by-product yield, rapid fermentation, and the ability to limit the amount of residual sugars remaining in the ferment. Such characteristics have a marked effect on the viability of the industrial process.

[0006] Yeast of the genus Saccharomyces exhibits many of the characteristics required for production of ethanol. In particular, strains of Saccharomyces cerevisiae are widely used for the production of ethanol in the fuel ethanol industry. Strains of Saccharomyces cerevisiae that are widely used in the fuel ethanol industry have the ability to produce high yields of ethanol under fermentation conditions found in, for example, the fermentation of corn mash. An example of such a strain is the yeast used in commercially available ethanol yeast product called ETHANOL RED® (ER).

[0007] The addition of exogenous protease to corn mash has been a strategic approach to increase availability amino nitrogen and accelerate rates of ethanol fermentation (See, e.g., Biomass 16 (1988) 2, pp. 77-87; U.S. Pat. No. 5,231,017; WO2003/066826; WO2007/145912; WO2010/008841; WO2014/037438; WO2015/078372). We also described expression of heterologous proteases in Saccharomyces cerevisiae for ethanol fermentation (WO2018/222990, the content of which is incorporated herein by reference).

[0008] Despite significant improvement of ethanol production processes over the past decade there is still a desire and need for providing improved processes of ethanol fermentation from starch and cellulosic containing material in an economically and commercially relevant scale.

### SUMMARY

[0009] Described herein are, inter alia, methods for producing a fermentation product, such as ethanol, from starch or cellulosic-containing material, and yeast suitable for use in such processes.

[0010] A first aspect relates to a yeast cells (e.g., recombinant yeast cells) comprising a heterologous polynucleotide encoding an Amino Acid/Auxin Permease (AAAP).

[0011] In one embodiment, the Amino Acid/Auxin Permease (AAAP) comprises one or more motifs selected from:

Motif A:
(SEQ ID NO: 542)
L-[I, L]-T-T-D-[I, V]-L-G-P;
Motif B:
(SEQ ID NO: 543)
[V, I]-[F, Y]-[A, S]-[F, Y, W]-G-G;
Motif C:
(SEQ ID NO: 544)
E-[M, L]-[A, K, R]-[H, K, N, R]-P-X-[D, E]-F;
and
Motif D:
(SEQ ID NO: 545)
A-X-X-L-Y-[G, S]-N-[I, V]-[A, G, S]-[I, L, V]-
K-X-X-Y.
In one embodiment, Motif A is Motif A2:
(SEQ ID NO: 546)
L-I-T-T-D-I-L-G-P.

[0012] In one embodiment, the heterologous polynucleotide encoding the Amino Acid/Auxin Permease (AAAP) is a recombinant modification introduced into the cell. In one embodiment, the yeast cell is a recombinant cell. In one embodiment, the heterologous polynucleotide encoding the AAAP is operably linked to a promoter that is foreign to the polynucleotide. In one embodiment, the heterologous polynucleotide encoding the AAAP is introduced into the cell using non-recombinant breeding techniques. In one embodiment, the yeast cell is a non-recombinant cell.

[0013] In one embodiment, the Amino Acid/Auxin Permease (AAAP) has at least 60%, e.g., at least 65%, 70%, 75%, 80%, 85%, 90%, 95%, 97%, 98%, 99%, or 100% sequence identity to the amino acid sequence of any one of the AAAPs shown in Table 2 (e.g., any one of SEQ ID NOs: 163, 164 and 432-541).

[0014] In one embodiment, the yeast cell further comprises a disruption to an endogenous transporter gene, such as any one of the transporter genes shown in Table 1 (e.g., any one of SEQ ID NOs: 1-77 and 80-85) and/or any one of the Amino Acid/Auxin Permease (AAAP) genes shown in Table 2 (e.g., any one of SEQ ID NOs: 78, 79 and 322-431).

[0015] In one embodiment, the Amino Acid/Auxin Permease is not from Torulaspora microellipsoides (such as the AAAP of SEQ ID NO: 163 and/or the AAAP of SEQ ID NO: 164).

[0016] In one embodiment, the yeast cell is other than: Saccharomyces cerevisiae MBG4851 (deposited under Accession No. V14/004037 at National Measurement Institute, Victoria, Australia) or a derivative thereof; Saccharomyces cerevisiae MBG4911 (deposited under Accession No. V15/001459 at National Measurement Institute, Victoria, Australia) or a derivative thereof; Saccharomyces cerevisiae MBG4913 (deposited under Accession No. V15/001460 at National Measurement Institute, Victoria, Australia) or a derivative thereof; Saccharomyces cerevisiae MBG4914 (deposited under Accession No. V15/001461 at National Measurement Institute, Victoria, Australia) or a derivative thereof; Saccharomyces cerevisiae MBG4930 (deposited under Accession No. V15/004035 at National Measurement Institute, Victoria, Australia) or a derivative thereof; Saccharomyces cerevisiae MBG4931 (deposited under Accession No. V15/004036 at National Measurement Institute, Victoria, Australia) or a derivative thereof; Saccharomyces cerevisiae MBG4932 (deposited under Accession No. V15/004037 at National Measurement Institute, Victoria, Australia) or a derivative thereof.

[0017] In one embodiment, the yeast cell is capable of maintaining the same yield of a fermentation product with less supplemental nitrogen (e.g., urea, ammonia, ammonium hydroxide) during fermentation, when compared to an otherwise identical fermenting organism lacking the heterologous polynucleotide encoding the transporter. In one embodiment, the yeast cell is capable of increased tripeptides or tetrapeptides (e.g., under conditions described herein), when compared to an otherwise identical fermenting organism lacking the heterologous polynucleotide encoding the transporter.

[0018] In one embodiment, the yeast cell further comprises a heterologous polynucleotide encoding a glucoamylase, alpha-amylase, or protease.

[0019] In one embodiment, the yeast cell comprises multiple copies of the heterologous polynucleotide encoding the transporter.

[0020] In one embodiment, the yeast cell is a Saccharomyces, Rhodotorula, Schizosaccharomyces, Kluyveromyces, Pichia, Issatchenkia, Hansenula, Rhodosporidium, Candida, Torulaspora, Zygosaccharomyces, Yarrowia, Lipomyces, Cryptococcus, or Dekkera sp. cell. In one particular embodiment, the yeast cell is a Saccharomyces cerevisiae cell.

[0021] A second aspect relates to methods of producing a fermentation product from a starch-containing or cellulosic-containing material comprising: (a) saccharifying the starch-containing or cellulosic-containing material; and (b) fermenting the saccharified material of step (a) with the yeast cells of the first aspect.

[0022] In one embodiment, the method comprises liquefying the starch-containing material at a temperature above the initial gelatinization temperature in the presence of an alpha-amylase and/or a protease prior to saccharification. In one embodiment, the fermentation product is ethanol.

[0023] A third aspect relates to methods of producing a derivative of a yeast strain of the first aspect, comprising culturing a yeast strain of the first aspect with a second yeast strain under conditions which permit combining of DNA between the first and second yeast strains, and screening or selecting for a derivatived yeast strain comprising the heterologous polynucleotide encoding the transporter.

[0024] A fourth aspect relates to compositions comprising the yeast strain of the first aspect with one or more naturally occurring and/or non-naturally occurring components, such as components are selected from the group consisting of: surfactants, emulsifiers, gums, swelling agents, and antioxidants.

### BRIEF DESCRIPTION OF THE FIGURES

[0025] FIG. 1 shows improvement of tripeptide and tetrapeptide uptake by MBG4994 vs Ethanol Red® (ER) at 24 h during corn mash ethanol fermentation.

[0026] FIG. 2 shows final ethanol titer after 52 h fermentation of industrially prepared corn mash using the strains listed in Table 8.

[0027] FIG. 3 shows residual tripeptide after 29 h fermentation using industrially prepared corm mash with the strains listed in Table 8.

[0028] FIG. 4 shows residual tetrapeptide after 29 h fermentation using industrially prepared corm mash with the strains listed in Table 8.

[0029] FIG. 5 shows final ethanol titer after 53 h fermentation with industrially prepared mash using strains listed in Table 9.

[0030] FIG. 6 shows a plasmid map of pMBin369 described in Example 2.

[0031] FIG. 7 shows final ethanol titer after 68 h fermentation in corn mash with varied nitrogen concentration using Ethanol Red® (ER) and MBG4994.

[0032] FIG. 8 shows a plasmid map for pMLBA635.

[0033] FIGS. 9A-9C show a graphical representation of the data of Table 12 in Example 10. The horizontal line at a slope of 9.943 shows the value for the Ethanol Red® (ER) strain without a FOT gene (negative control). Since the graph is sorted based on the mean slope from 2-6 hours, strains to the right of Ethanol Red® (ER) are those that showed faster growth than the control over this time period.

[0034] FIG. 10 shows a graphical representation of the data of Table 14 in Example 12. The horizontal line at a slope of 9.133 shows the value for the ERΔOPT1ΔOPT2Δygl114 strain without a AAAP gene (negative control, shown as “none” on the graph). Since the graph is sorted based on the mean slope from 2-6 hours, strains to the right of the control are those that showed faster growth over this time period.

### DEFINITIONS

[0035] Unless defined otherwise or clearly indicated by context, all technical and scientific terms used herein have the same meaning as commonly understood by one of ordinary skill in the art.

[0036] Allelic variant: The term “allelic variant” means any of two or more alternative forms of a gene occupying the same chromosomal locus. Allelic variation arises naturally through mutation and may result in polymorphism within populations. Gene mutations can be silent (no change in the encoded polypeptide) or may encode polypeptides having altered amino acid sequences. An allelic variant of a polypeptide is a polypeptide encoded by an allelic variant of a gene.

[0037] Amino Acid/Auxin Permease: The term “Amino Acid/Auxin Permease” or “AAAP” means an amino acid transport polypeptide classified as TC #2.A.18 in the Transporter Classification Database (TCDB). AAAP family proteins originate in eukaryotes and are typically 400-500 residues in length. Most of the size variation occurs as a result of the presence of long N-terminal hydrophilic extensions in some of the proteins. These proteins exhibit 11 (or 10) putative transmembrane α-helical spanners. Additional characterization of AAAPs are known in the art, e.g., Young et al., 1999, Biochimica et Biophysica Acta 1415: 306-322.

[0038] Auxiliary Activity 9: The term “Auxiliary Activity 9” or “AA9” means a polypeptide classified as a lytic polysaccharide monooxygenase (Quinlan et al., 2011, Proc. Natl. Acad. Sci. USA 208: 15079-15084; Phillips et al., 2011, ACS Chem. Biol. 6: 1399-1406; Lin et al., 2012, Structure 20: 1051-1061). AA9 polypeptides were formerly classified into the glycoside hydrolase Family 61 (GH61) according to Henrissat, 1991, Biochem. J. 280: 309-316, and Henrissat and Bairoch, 1996, Biochem. J. 316: 695-696.

[0039] AA9 polypeptides enhance the hydrolysis of a cellulosic-containing material by an enzyme having cellulolytic activity. Cellulolytic enhancing activity can be determined by measuring the increase in reducing sugars or the increase of the total of cellobiose and glucose from the hydrolysis of a cellulosic-containing material by cellulolytic enzyme under the following conditions: 1-50 mg of total protein/g of cellulose in pretreated corn stover (PCS), wherein total protein is comprised of 50-99.5% w/w cellulolytic enzyme protein and 0.5-50% w/w protein of an AA9 polypeptide for 1-7 days at a suitable temperature, such as 40° C.-80° C., e.g., 50° C., 55° C., 60° C., 65° C., or 70° C., and a suitable pH, such as 4-9, e.g., 4.5, 5.0, 5.5, 6.0, 6.5, 7.0, 7.5, 8.0, or 8.5, compared to a control hydrolysis with equal total protein loading without cellulolytic enhancing activity (1-50 mg of cellulolytic protein/g of cellulose in PCS).

[0040] AA9 polypeptide enhancing activity can be determined using a mixture of CELLUCLAST™ 1.5 L (Novozymes A/S, Bagsærd, Denmark) and beta-glucosidase as the source of the cellulolytic activity, wherein the beta-glucosidase is present at a weight of at least 2-5% protein of the cellulase protein loading. In one embodiment, the beta-glucosidase is an Aspergillus oryzae beta-glucosidase (e.g., recombinantly produced in Aspergillus oryzae according to WO02/095014). In another embodiment, the beta-glucosidase is an Aspergillus fumigatus beta-glucosidase (e.g., recombinantly produced in Aspergillus oryzae as described in WO02/095014).

[0041] AA9 polypeptide enhancing activity can also be determined by incubating an AA9 polypeptide with 0.5% phosphoric acid swollen cellulose (PASC), 100 mM sodium acetate pH 5, 1 mM MnSO₄, 0.1% gallic acid, 0.025 mg/ml of Aspergillus fumigatus beta-glucosidase, and 0.01% TRITON® X-100 (4-(1,1,3,3-tetramethylbutyl)phenyl-polyethylene glycol) for 24-96 hours at 40° C. followed by determination of the glucose released from the PASC.

[0042] AA9 polypeptide enhancing activity can also be determined according to WO2013/028928 for high temperature compositions.

[0043] AA9 polypeptides enhance the hydrolysis of a cellulosic-containing material catalyzed by enzyme having cellulolytic activity by reducing the amount of cellulolytic enzyme required to reach the same degree of hydrolysis preferably at least 1.01-fold, e.g., at least 1.05-fold, at least 1.10-fold, at least 1.25-fold, at least 1.5-fold, at least 2-fold, at least 3-fold, at least 4-fold, at least 5-fold, at least 10-fold, or at least 20-fold.

[0044] Beta-glucosidase: The term “beta-glucosidase” means a beta-D-glucoside glucohydrolase (E.C. 3.2.1.21) that catalyzes the hydrolysis of terminal non-reducing beta-D-glucose residues with the release of beta-D-glucose. Beta-glucosidase activity can be determined using p-nitrophenyl-beta-D-glucopyranoside as substrate according to the procedure of Venturi et al., 2002, J. Basic Microbiol. 42: 55-66. One unit of beta-glucosidase is defined as 1.0 μmole of p-nitrophenolate anion produced per minute at 25° C., pH 4.8 from 1 mM p-nitrophenyl-beta-D-glucopyranoside as substrate in 50 mM sodium citrate containing 0.01% TWEEN® 20.

[0045] Beta-xylosidase: The term “beta-xylosidase” means a beta-D-xyloside xylohydrolase (E.C. 3.2.1.37) that catalyzes the exo-hydrolysis of short beta (1→4)-xylooligosaccharides to remove successive D-xylose residues from non-reducing termini. Beta-xylosidase activity can be determined using 1 mM p-nitrophenyl-beta-D-xyloside as substrate in 100 mM sodium citrate containing 0.01% TWEEN® 20 at pH 5, 40° C. One unit of beta-xylosidase is defined as 1.0 μmole of p-nitrophenolate anion produced per minute at 40° C., pH 5 from 1 mM p-nitrophenyl-beta-D-xyloside in 100 mM sodium citrate containing 0.01% TWEEN® 20.

[0046] Catalase: The term “catalase” means a hydrogen-peroxide:hydrogen-peroxide oxidoreductase (EC 1.11.1.6) that catalyzes the conversion of 2H₂O₂ to O₂+2 H₂O. For purposes of the present invention, catalase activity is determined according to U.S. Pat. No. 5,646,025. One unit of catalase activity equals the amount of enzyme that catalyzes the oxidation of 1 μmole of hydrogen peroxide under the assay conditions.

[0047] Catalytic domain: The term “catalytic domain” means the region of an enzyme containing the catalytic machinery of the enzyme.

[0048] Cellobiohydrolase: The term “cellobiohydrolase” means a 1,4-beta-D-glucan cellobiohydrolase (E.C. 3.2.1.91 and E.C. 3.2.1.176) that catalyzes the hydrolysis of 1,4-beta-D-glucosidic linkages in cellulose, cellooligosaccharides, or any beta-1,4-linked glucose containing polymer, releasing cellobiose from the reducing end (cellobiohydrolase I) or non-reducing end (cellobiohydrolase II) of the chain (Teeri, 1997, Trends in Biotechnology 15: 160-167; Teen et al., 1998, Biochem. Soc. Trans. 26: 173-178). Cellobiohydrolase activity can be determined according to the procedures described by Lever et al., 1972, Anal. Biochem. 47: 273-279; van Tilbeurgh et al., 1982, FEBS Letters 149: 152-156; van Tilbeurgh and Claeyssens, 1985, FEBS Letters 187: 283-288; and Tomme et al., 1988, Eur. J. Biochem. 170: 575-581.

[0049] Cellulolytic enzyme or cellulase: The term “cellulolytic enzyme” or “cellulase” means one or more (e.g., two, several) enzymes that hydrolyze a cellulosic-containing material. Such enzymes include endoglucanase(s), cellobiohydrolase(s), beta-glucosidase(s), or combinations thereof. The two basic approaches for measuring cellulolytic enzyme activity include: (1) measuring the total cellulolytic enzyme activity, and (2) measuring the individual cellulolytic enzyme activities (endoglucanases, cellobiohydrolases, and beta-glucosidases) as reviewed in Zhang et al., 2006, Biotechnology Advances 24: 452-481. Total cellulolytic enzyme activity can be measured using insoluble substrates, including Whatman NW1 filter paper, microcrystalline cellulose, bacterial cellulose, algal cellulose, cotton, pretreated lignocellulose, etc. The most common total cellulolytic activity assay is the filter paper assay using Whatman N51 filter paper as the substrate. The assay was established by the International Union of Pure and Applied Chemistry (IUPAC) (Ghose, 1987, Pure Appl. Chem. 59: 257-68).

[0050] Cellulolytic enzyme activity can be determined by measuring the increase in production/release of sugars during hydrolysis of a cellulosic-containing material by cellulolytic enzyme(s) under the following conditions: 1-50 mg of cellulolytic enzyme protein/g of cellulose in pretreated corn stover (PCS) (or other pretreated cellulosic-containing material) for 3-7 days at a suitable temperature such as 40° C.-80° C., e.g., 50° C., 55° C., 60° C., 65° C., or 70° C., and a suitable pH such as 4-9, e.g., 5.0, 5.5, 6.0, 6.5, or 7.0, compared to a control hydrolysis without addition of cellulolytic enzyme protein. Typical conditions are 1 ml reactions, washed or unwashed PCS, 5% insoluble solids (dry weight), 50 mM sodium acetate pH 5, 1 mM MnSO₄, 50° C., 55° C., or 60° C., 72 hours, sugar analysis by AMINEX® HPX-87H column chromatography (Bio-Rad Laboratories, Inc., Hercules, Calif., USA).

[0051] Coding sequence: The term “coding sequence” or “coding region” means a polynucleotide sequence, which specifies the amino acid sequence of a polypeptide. The boundaries of the coding sequence are generally determined by an open reading frame, which usually begins with the ATG start codon or alternative start codons such as GTG and TTG and ends with a stop codon such as TAA, TAG, and TGA. The coding sequence may be a sequence of genomic DNA, cDNA, a synthetic polynucleotide, and/or a recombinant polynucleotide.

[0052] Control sequence: The term “control sequence” means a nucleic acid sequence necessary for polypeptide expression. Control sequences may be native or foreign to the polynucleotide encoding the polypeptide, and native or foreign to each other. Such control sequences include, but are not limited to, a leader sequence, polyadenylation sequence, propeptide sequence, promoter sequence, signal peptide sequence, and transcription terminator sequence. The control sequences may be provided with linkers for the purpose of introducing specific restriction sites facilitating ligation of the control sequences with the coding region of the polynucleotide encoding a polypeptide.

[0053] Disruption: The term “disruption” means that a coding region and/or control sequence of a referenced gene is partially or entirely modified (such as by deletion, insertion, and/or substitution of one or more nucleotides) resulting in the absence (inactivation) or decrease in expression, and/or the absence or decrease of enzyme activity of the encoded polypeptide. The effects of disruption can be measured using techniques known in the art such as detecting the absence or decrease of enzyme activity using from cell-free extract measurements referenced herein; or by the absence or decrease of corresponding mRNA (e.g., at least 25% decrease, at least 50% decrease, at least 60% decrease, at least 70% decrease, at least 80% decrease, or at least 90% decrease); the absence or decrease in the amount of corresponding polypeptide having enzyme activity (e.g., at least 25% decrease, at least 50% decrease, at least 60% decrease, at least 70% decrease, at least 80% decrease, or at least 90% decrease); or the absence or decrease of the specific activity of the corresponding polypeptide having enzyme activity (e.g., at least 25% decrease, at least 50% decrease, at least 60% decrease, at least 70% decrease, at least 80% decrease, or at least 90% decrease). Disruptions of a particular gene of interest can be generated by methods known in the art, e.g., by directed homologous recombination (see Methods in Yeast Genetics (1997 edition), Adams, Gottschling, Kaiser, and Stems, Cold Spring Harbor Press (1998)).

[0054] Endogenous gene: The term “endogenous gene” means a gene that is native to the referenced host cell. “Endogenous gene expression” means expression of an endogenous gene.

[0055] Endoglucanase: The term “endoglucanase” means a 4-(1,3;1,4)-beta-D-glucan 4-glucanohydrolase (E.C. 3.2.1.4) that catalyzes endohydrolysis of 1,4-beta-D-glycosidic linkages in cellulose, cellulose derivatives (such as carboxymethyl cellulose and hydroxyethyl cellulose), lichenin, beta-1,4 bonds in mixed beta-1,3-1,4 glucans such as cereal beta-D-glucans or xyloglucans, and other plant material containing cellulosic components. Endoglucanase activity can be determined by measuring reduction in substrate viscosity or increase in reducing ends determined by a reducing sugar assay (Zhang et al., 2006, Biotechnology Advances 24: 452-481). Endoglucanase activity can also be determined using carboxymethyl cellulose (CMC) as substrate according to the procedure of Ghose, 1987, Pure and Appl. Chem. 59: 257-268, at pH 5, 40° C.

[0056] Expression: The term “expression” includes any step involved in the production of the polypeptide including, but not limited to, transcription, post-transcriptional modification, translation, post-translational modification, and secretion. Expression can be measured—for example, to detect increased expression—by techniques known in the art, such as measuring levels of mRNA and/or translated polypeptide.

[0057] Expression vector: The term “expression vector” means a linear or circular DNA molecule that comprises a polynucleotide encoding a polypeptide and is operably linked to control sequences that provide for its expression.

[0058] Fermentable medium: The term “fermentable medium” or “fermentation medium” refers to a medium comprising one or more (e.g., two, several) sugars, such as glucose, fructose, sucrose, cellobiose, xylose, xylulose, arabinose, mannose, galactose, and/or soluble oligosaccharides, wherein the medium is capable, in part, of being converted (fermented) by a host cell into a desired product, such as ethanol. In some instances, the fermentation medium is derived from a natural source, such as sugar cane, starch, or cellulose, and may be the result of pretreating the source by enzymatic hydrolysis (saccharification). The term fermentation medium is understood herein to refer to a medium before the fermenting organism is added, such as, a medium resulting from a saccharification process, as well as a medium used in a simultaneous saccharification and fermentation process (SSF).

[0059] Hemicellulolytic enzyme or hemicellulase: The term “hemicellulolytic enzyme” or “hemicellulase” means one or more (e.g., two, several) enzymes that hydrolyze a hemicellulosic material. See, for example, Shallom and Shoham, 2003, Current Opinion In Microbiology 6(3): 219-228). Hemicellulases are key components in the degradation of plant biomass. Examples of hemicellulases include, but are not limited to, an acetylmannan esterase, an acetylxylan esterase, an arabinanase, an arabinofuranosidase, a coumaric acid esterase, a feruloyl esterase, a galactosidase, a glucuronidase, a glucuronoyl esterase, a mannanase, a mannosidase, a xylanase, and a xylosidase. The substrates for these enzymes, hemicelluloses, are a heterogeneous group of branched and linear polysaccharides that are bound via hydrogen bonds to the cellulose microfibrils in the plant cell wall, crosslinking them into a robust network. Hemicelluloses are also covalently attached to lignin, forming together with cellulose a highly complex structure. The variable structure and organization of hemicelluloses require the concerted action of many enzymes for its complete degradation. The catalytic modules of hemicellulases are either glycoside hydrolases (GHs) that hydrolyze glycosidic bonds, or carbohydrate esterases (CEs), which hydrolyze ester linkages of acetate or ferulic acid side groups. These catalytic modules, based on homology of their primary sequence, can be assigned into GH and CE families. Some families, with an overall similar fold, can be further grouped into clans, marked alphabetically (e.g., GH-A). A most informative and updated classification of these and other carbohydrate active enzymes is available in the Carbohydrate-Active Enzymes (CAZy) database. Hemicellulolytic enzyme activities can be measured according to Ghose and Bisaria, 1987, Pure & Appl. Chem. 59: 1739-1752, at a suitable temperature such as 40° C.-80° C., e.g., 50° C., 55° C., 60° C., 65° C., or 70° C., and a suitable pH such as 4-9, e.g., 5.0, 5.5, 6.0, 6.5, or 7.0.

[0060] Heterologous polynucleotide: The term “heterologous polynucleotide” is defined herein as a polynucleotide that is not native to the host cell; a native polynucleotide in which structural modifications have been made to the coding region; a native polynucleotide whose expression is quantitatively altered as a result of a manipulation of the DNA by recombinant DNA techniques, e.g., a different (foreign) promoter; or a native polynucleotide in a host cell having one or more extra copies of the polynucleotide to quantitatively alter expression. A “heterologous gene” is a gene comprising a heterologous polynucleotide.

[0061] High stringency conditions: The term “high stringency conditions” means for probes of at least 100 nucleotides in length, prehybridization and hybridization at 42° C. in 5×SSPE, 0.3% SDS, 200 micrograms/ml sheared and denatured salmon sperm DNA, and 50% formamide, following standard Southern blotting procedures for 12 to 24 hours. The carrier material is finally washed three times each for 15 minutes using 0.2×SSC, 0.2% SDS at 65° C.

[0062] Host cell: The term “host cell” means any cell type that is susceptible to transformation, transfection, transduction, and the like with a nucleic acid construct or expression vector comprising a polynucleotide described herein (e.g., a polynucleotide encoding a transporter, or regulator thereof). The term “host cell” encompasses any progeny of a parent cell that is not identical to the parent cell due to mutations that occur during replication. The term “recombinant cell” is defined herein as a non-naturally occurring host cell comprising one or more (e.g., two, several) heterologous polynucleotides introduced using recombinant techniques.

[0063] Low stringency conditions: The term “low stringency conditions” means for probes of at least 100 nucleotides in length, prehybridization and hybridization at 42° C. in 5×SSPE, 0.3% SDS, 200 micrograms/ml sheared and denatured salmon sperm DNA, and 25% formamide, following standard Southern blotting procedures for 12 to 24 hours. The carrier material is finally washed three times each for 15 minutes using 0.2×SSC, 0.2% SDS at 50° C.

[0064] Mature polypeptide: The term “mature polypeptide” is defined herein as a polypeptide having biological activity that is in its final form following translation and any post-translational modifications, such as N-terminal processing, C-terminal truncation, glycosylation, phosphorylation, etc.

[0065] Medium stringency conditions: The term “medium stringency conditions” means for probes of at least 100 nucleotides in length, prehybridization and hybridization at 42° C. in 5×SSPE, 0.3% SDS, 200 micrograms/ml sheared and denatured salmon sperm DNA, and 35% formamide, following standard Southern blotting procedures for 12 to 24 hours. The carrier material is finally washed three times each for 15 minutes using 0.2×SSC, 0.2% SDS at 55° C.

[0066] Medium-high stringency conditions: The term “medium-high stringency conditions” means for probes of at least 100 nucleotides in length, prehybridization and hybridization at 42° C. in 5×SSPE, 0.3% SDS, 200 micrograms/ml sheared and denatured salmon sperm DNA, and 35% formamide, following standard Southern blotting procedures for 12 to 24 hours. The carrier material is finally washed three times each for 15 minutes using 0.2×SSC, 0.2% SDS at 60° C.

[0067] Nucleic acid construct: The term “nucleic acid construct” means a polynucleotide comprises one or more (e.g., two, several) control sequences. The polynucleotide may be single-stranded or double-stranded, and may be isolated from a naturally occurring gene, modified to contain segments of nucleic acids in a manner that would not otherwise exist in nature, or synthetic.

[0068] Operably linked: The term “operably linked” means a configuration in which a control sequence is placed at an appropriate position relative to the coding sequence of a polynucleotide such that the control sequence directs expression of the coding sequence.

[0069] Pretreated corn stover: The term “Pretreated Corn Stover” or “PCS” means a cellulosic-containing material derived from corn stover by treatment with heat and dilute sulfuric acid, alkaline pretreatment, neutral pretreatment, or any pretreatment known in the art.

[0070] Protease: The term “protease” is defined herein as an enzyme that hydrolyses peptide bonds. It includes any enzyme belonging to the EC 3.4 enzyme group (including each of the thirteen subclasses thereof). The EC number refers to Enzyme Nomenclature 1992 from NC-IUBMB, Academic Press, San Diego, Calif., including supplements 1-5 published in Eur. J. Biochem. 223: 1-5 (1994); Eur. J. Biochem. 232: 1-6 (1995); Eur. J. Biochem. 237: 1-5 (1996); Eur. J. Biochem. 250: 1-6 (1997); and Eur. J. Biochem. 264: 610-650 (1999); respectively. The term “subtilases” refer to a sub-group of serine protease according to Siezen et al., 1991, Protein Engng. 4: 719-737 and Siezen et al., 1997, Protein Science 6: 501-523. Serine proteases or serine peptidases is a subgroup of proteases characterised by having a serine in the active site, which forms a covalent adduct with the substrate. Further the subtilases (and the serine proteases) are characterised by having two active site amino acid residues apart from the serine, namely a histidine and an aspartic acid residue. The subtilases may be divided into 6 sub-divisions, i.e. the Subtilisin family, the Thermitase family, the Proteinase K family, the Lantibiotic peptidase family, the Kexin family and the Pyrolysin family. The term “protease activity” means a proteolytic activity (EC 3.4). Proteases may be endopeptidases (EC 3.4.21). Protease activity may be determined using methods described herein (See, Examples), known in the art (e.g., US 2015/0125925) or using commercially available assay kits (e.g., Sigma-Aldrich).

[0071] Sequence Identity: The relatedness between two amino acid sequences or between two nucleotide sequences is described by the parameter “sequence identity”.

[0072] For purposes described herein, the degree of sequence identity between two amino acid sequences is determined using the Needleman-Wunsch algorithm (Needleman and Wunsch, J. Mol. Biol. 1970, 48, 443-453) as implemented in the Needle program of the EMBOSS package (EMBOSS: The European Molecular Biology Open Software Suite, Rice et al., Trends Genet 2000, 16, 276-277), preferably version 3.0.0 or later. The optional parameters used are gap open penalty of 10, gap extension penalty of 0.5, and the EBLOSUM62 (EMBOSS version of BLOSUM62) substitution matrix. The output of Needle labeled “longest identity” (obtained using the -nobrief option) is used as the percent identity and is calculated as follows:

(Identical Residues×100)/(Length of the Referenced Sequence−Total Number of Gaps in Alignment)

[0073] For purposes described herein, the degree of sequence identity between two deoxyribonucleotide sequences is determined using the Needleman-Wunsch algorithm (Needleman and Wunsch, 1970, supra) as implemented in the Needle program of the EMBOSS package (EMBOSS: The European Molecular Biology Open Software Suite, Rice et al., 2000, supra), preferably version 3.0.0 or later. The optional parameters used are gap open penalty of 10, gap extension penalty of 0.5, and the EDNAFULL (EMBOSS version of NCBI NUC4.4) substitution matrix. The output of Needle labeled “longest identity” (obtained using the -nobrief option) is used as the percent identity and is calculated as follows:

(Identical Deoxyribonucleotides×100)/(Length of Referenced Sequence−Total Number of Gaps in Alignment)

[0074] Signal peptide: The term “signal peptide” is defined herein as a peptide linked (fused) in frame to the amino terminus of a polypeptide having biological activity and directs the polypeptide into the cell's secretory pathway.

[0075] Very high stringency conditions: The term “very high stringency conditions” means for probes of at least 100 nucleotides in length, prehybridization and hybridization at 42° C. in 5×SSPE, 0.3% SDS, 200 micrograms/ml sheared and denatured salmon sperm DNA, and 50% formamide, following standard Southern blotting procedures for 12 to 24 hours. The carrier material is finally washed three times each for 15 minutes using 0.2×SSC, 0.2% SDS at 70° C.

[0076] Very low stringency conditions: The term “very low stringency conditions” means for probes of at least 100 nucleotides in length, prehybridization and hybridization at 42° C. in 5×SSPE, 0.3% SDS, 200 micrograms/ml sheared and denatured salmon sperm DNA, and 25% formamide, following standard Southern blotting procedures for 12 to 24 hours. The carrier material is finally washed three times each for 15 minutes using 0.2×SSC, 0.2% SDS at 45° C.

[0077] Xylanase: The term “xylanase” means a 1,4-beta-D-xylan-xylohydrolase (E.C. 3.2.1.8) that catalyzes the endohydrolysis of 1,4-beta-D-xylosidic linkages in xylans. Xylanase activity can be determined with 0.2% AZCL-arabinoxylan as substrate in 0.01% TRITON® X-100 and 200 mM sodium phosphate pH 6 at 37° C. One unit of xylanase activity is defined as 1.0 μmole of azurine produced per minute at 37° C., pH 6 from 0.2% AZCL-arabinoxylan as substrate in 200 mM sodium phosphate pH 6.

[0078] Xylose Isomerase: The term “Xylose Isomerase” or “XI” means an enzyme which can catalyze D-xylose into D-xylulose in vivo, and convert D-glucose into D-fructose in vitro. Xylose isomerase is also known as “glucose isomerase” and is classified as E.C. 5.3.1.5.

[0079] Reference to “about” a value or parameter herein includes embodiments that are directed to that value or parameter per se. For example, description referring to “about X” includes the embodiment “X”. When used in combination with measured values, “about” includes a range that encompasses at least the uncertainty associated with the method of measuring the particular value, and can include a range of plus or minus two standard deviations around the stated value.

[0080] Likewise, reference to a gene or polypeptide that is “derived from” another gene or polypeptide X, includes the gene or polypeptide X.

[0081] As used herein and in the appended claims, the singular forms “a,” “or,” and “the” include plural referents unless the context clearly dictates otherwise.

[0082] It is understood that the embodiments described herein include “consisting” and/or “consisting essentially of” embodiments. As used herein, except where the context requires otherwise due to express language or necessary implication, the word “comprise” or variations such as “comprises” or “comprising” is used in an inclusive sense, i.e. to specify the presence of the stated features but not to preclude the presence or addition of further features in various embodiments.

### DETAILED DESCRIPTION

[0083] Described herein, inter alia, are methods for producing a fermentation product, such as ethanol, from starch or cellulosic containing material.

[0084] During industrial scale fermentation, yeast encounter various physiological challenges including variable concentrations of sugars, high concentrations of yeast metabolites such as ethanol, glycerol, organic acids, osmotic stress, as well as potential competition from contaminating microbes such as wild yeasts and bacteria. As a consequence, many yeasts are not suitable for use in industrial fermentation. The most widely used commercially available industrial strain of Saccharomyces (i.e. for industrial scale fermentation) is the Saccharomyces cerevisiae strain used, for example, in the product Ethanol Red® (ER). This strain is well suited to industrial ethanol production; however, it requires significant amounts of added nitrogen, such urea and ammonia, to promote yeast growth.

[0085] The Applicant has developed yeast strains for ethanol fermentation that are capable of improved utilization of nitrogen, such as nitrogen from peptides (e.g., tripeptides/tetrapeptides) in the fermentation medium by expression of a transporter, in particular an Amino Acid/Auxin Permease (AAAP). The Applicant's resulting yeasts can be used in fermentation methods that provide fast rates and high yields without the dependence on large amounts of exogenously added protease and/or supplemental nitrogen source.

[0086] In one aspect is a method of producing a fermentation product from a starch-containing or cellulosic-containing material comprising:

(a) saccharifying the starch-containing or cellulosic-containing material; and
(b) fermenting the saccharified material of step (a) with a fermenting organism;

[0087] wherein the fermenting organism comprises a genetic modification that increases or decreases expression of transporter/permease or regulator thereof.

[0088] Steps a) and b) may be carried out either sequentially or simultaneously (SSF). In one embodiment, steps a) and b) are carried out simultaneously (SSF). In another embodiment, steps a) and b) are carried out sequentially.

### Fermenting Organism

[0089] The fermenting organism described herein may be derived from any host cell known to the skilled artisan capable of producing a fermentation product, such as ethanol. As used herein, a “derivative” of strain is derived from a referenced strain, such as through mutagenesis, recombinant DNA technology, mating, cell fusion, or cytoduction between yeast strains. Those skilled in the art will understand that the genetic alterations, including metabolic modifications exemplified herein, may be described with reference to a suitable host organism and their corresponding metabolic reactions or a suitable source organism for desired genetic material such as genes for a desired metabolic pathway. However, given the complete genome sequencing of a wide variety of organisms and the high level of skill in the area of genomics, those skilled in the art can apply the teachings and guidance provided herein to other organisms. For example, the metabolic alterations exemplified herein can readily be applied to other species by incorporating the same or analogous encoding nucleic acid from species other than the referenced species.

[0090] The host cells for preparing the genetically modified cells described herein can be from any suitable host, such as a yeast strain, including, but not limited to, a Saccharomyces, Rhodotorula, Schizosaccharomyces, Kluyveromyces, Pichia, Hansenula, Issatchenkia, Rhodosporidium, Candida, Yarrowia, Lipomyces, Cryptococcus, or Dekkera sp. cell. In some embodiments, the yeast cell is a I. orientalis, C. lambica, S. bulderi or a S. cerevisiae cell. In particular, Saccharomyces host cells are contemplated, such as Saccharomyces cerevisiae, bayanus or carlsbergensis cells. In one embodiment, the yeast cell is a Saccharomyces cerevisiae cell.

[0091] Suitable cells can, for example, be derived from commercially available strains and polyploid or aneuploid industrial strains, including but not limited to those from Superstart™, THERMOSACC®, 05 FUEL™, XyloFerm®, etc. (Lallemand); RED STAR and ETHANOL RED® (ER; Fermentis/Lesaffre, USA); FALI (AB Mauri); Baker's Best Yeast, Baker's Compressed Yeast, etc. (Fleishmann's Yeast); BIOFERM AFT, XP, CF, and XR (North American Bioproducts Corp.); Turbo Yeast (Gert Strand AB); and FERMIOL® (DSM Specialties). Other useful yeast strains are available from biological depositories such as the American Type Culture Collection (ATCC) or the Deutsche Sammlung von Mikroorganismen und Zellkulturen GmbH (DSMZ), such as, e.g., BY4741 (e.g., ATCC 201388); Y108-1 (ATCC PTA.10567) and NRRL YB-1952 (ARS Culture Collection). Still other S. cerevisiae strains suitable as host cells DBY746, [Alpha][Eta]22, S150-2B, GPY55-15Ba, CEN.PK, USM21, TMB3500, TMB3400, VTT-A-63015, VTT-A-85068, VTT-c-79093 and their derivatives as well as Saccharomyces sp. 1400, 424A (LNH-ST), 259A (LNH-ST) and derivatives thereof. In one embodiment, the recombinant cell is a derivative of a strain Saccharomyces cerevisiae CIBTS1260 (deposited under Accession No. NRRL Y-50973 at the Agricultural Research Service Culture Collection (NRRL), Illinois 61604 U.S.A.).

[0092] The genetic modifications may be introduced using methods known in the art and described herein, such as recombinant techniques, as well as non-recombinant breeding techniques (e.g., methods described and concerned in U.S. Pat. No. 8,257,959).

[0093] The strain may also be a derivative of Saccharomyces cerevisiae strain NMI V14/004037 (See, WO2015/143324 and WO2015/143317 each incorporated herein by reference), strain nos. V15/004035, V15/004036, and V15/004037 (See, WO2016/153924 incorporated herein by reference), strain nos. V15/001459, V15/001460, V15/001461 (See, WO2016/138437 incorporated herein by reference) or any strain described in WO2017/087330 (incorporated herein by reference).

[0094] The fermenting organisms described herein may utilize expression vectors comprising the coding sequence of one or more (e.g., two, several) heterologous genes linked to one or more control sequences that direct expression in a suitable cell under conditions compatible with the control sequence(s). Such expression vectors may be used in any of the cells and methods described herein. The polynucleotides described herein may be manipulated in a variety of ways to provide for expression of a desired polypeptide. Manipulation of the polynucleotide prior to its insertion into a vector may be desirable or necessary depending on the expression vector. The techniques for modifying polynucleotides utilizing recombinant DNA methods are well known in the art.

[0095] A construct or vector (or multiple constructs or vectors) comprising the one or more (e.g., two, several) heterologous genes may be introduced into a cell so that the construct or vector is maintained as a chromosomal integrant or as a self-replicating extra-chromosomal vector as described earlier.

[0096] The various nucleotide and control sequences may be joined together to produce a recombinant expression vector that may include one or more (e.g., two, several) convenient restriction sites to allow for insertion or substitution of the polynucleotide at such sites. Alternatively, the polynucleotide(s) may be expressed by inserting the polynucleotide(s) or a nucleic acid construct comprising the sequence into an appropriate vector for expression. In creating the expression vector, the coding sequence is located in the vector so that the coding sequence is operably linked with the appropriate control sequences for expression.

[0097] The recombinant expression vector may be any vector (e.g., a plasmid or virus) that can be conveniently subjected to recombinant DNA procedures and can bring about expression of the polynucleotide. The choice of the vector will typically depend on the compatibility of the vector with the host cell into which the vector is to be introduced. The vector may be a linear or closed circular plasmid.

[0098] The vector may be an autonomously replicating vector, i.e., a vector that exists as an extrachromosomal entity, the replication of which is independent of chromosomal replication, e.g., a plasmid, an extrachromosomal element, a minichromosome, or an artificial chromosome. The vector may contain any means for assuring self-replication. Alternatively, the vector may be one that, when introduced into the host cell, is integrated into the genome and replicated together with the chromosome(s) into which it has been integrated. Furthermore, a single vector or plasmid or two or more vectors or plasmids that together contain the total DNA to be introduced into the genome of the cell, or a transposon, may be used.

[0099] The expression vector may contain any suitable promoter sequence that is recognized by a cell for expression of a gene described herein. The promoter sequence contains transcriptional control sequences that mediate the expression of the polypeptide. The promoter may be any polynucleotide that shows transcriptional activity in the cell of choice including mutant, truncated, and hybrid promoters, and may be obtained from genes encoding extracellular or intracellular polypeptides either homologous or heterologous to the cell.

[0100] Each heterologous polynucleotide described herein may be operably linked to a promoter that is foreign to the polynucleotide. For example, in one embodiment, the heterologous polynucleotide encoding the transporter is operably linked to a promoter foreign to the polynucleotide. The promoters may be identical to or share a high degree of sequence identity (e.g., at least about 80%, at least about 85%, at least about 90%, at least about 95%, or at least about 99%) with a selected native promoter.

[0101] Examples of suitable promoters for directing the transcription of the nucleic acid constructs in a yeast cells, include, but are not limited to, the promoters obtained from the genes for enolase, (e.g., S. cerevisiae enolase or I. orientalis enolase (ENO1)), galactokinase (e.g., S. cerevisiae galactokinase or I. orientalis galactokinase (GAL1)), alcohol dehydrogenase/glyceraldehyde-3-phosphate dehydrogenase (e.g., S. cerevisiae alcohol dehydrogenase/glyceraldehyde-3-phosphate dehydrogenase or I. orientalis alcohol dehydrogenase/glyceraldehyde-3-phosphate dehydrogenase (ADH1, ADH2/GAP)), triose phosphate isomerase (e.g., S. cerevisiae triose phosphate isomerase or I. orientalis triose phosphate isomerase (TPI)), metallothionein (e.g., S. cerevisiae metallothionein or I. orientalis metallothionein (CUP1)), 3-phosphoglycerate kinase (e.g., S. cerevisiae 3-phosphoglycerate kinase or I. orientalis 3-phosphoglycerate kinase (PGK)), PDC1, xylose reductase (XR), xylitol dehydrogenase (XDH), L-(+)-lactate-cytochrome c oxidoreductase (CYB2), translation elongation factor-1 (TEF1), translation elongation factor-2 (TEF2), glyceraldehyde-3-phosphate dehydrogenase (GAPDH), and orotidine 5′-phosphate decarboxylase (URA3) genes. Other useful promoters for yeast host cells are described by Romanos et al., 1992, Yeast 8: 423-488.

[0102] The control sequence may also be a suitable transcription terminator sequence, which is recognized by a host cell to terminate transcription. The terminator sequence is operably linked to the 3′-terminus of the polynucleotide encoding the polypeptide. Any terminator that is functional in the yeast cell of choice may be used. The terminator may be identical to or share a high degree of sequence identity (e.g., at least about 80%, at least about 85%, at least about 90%, at least about 95%, or at least about 99%) with the selected native terminator.

[0103] Suitable terminators for yeast host cells may be obtained from the genes for enolase (e.g., S. cerevisiae or I. orientalis enolase cytochrome C (e.g., S. cerevisiae or I. orientalis cytochrome (CYC1)), glyceraldehyde-3-phosphate dehydrogenase (e.g., S. cerevisiae or I. orientalis glyceraldehyde-3-phosphate dehydrogenase (gpd)), PDC1, XR, XDH, transaldolase (TAL), transketolase (TKL), ribose 5-phosphate ketol-isomerase (RKI), CYB2, and the galactose family of genes (especially the GAL10 terminator). Other useful terminators for yeast host cells are described by Romanos et al., 1992, supra.

[0104] The control sequence may also be an mRNA stabilizer region downstream of a promoter and upstream of the coding sequence of a gene which increases expression of the gene.

[0105] Examples of suitable mRNA stabilizer regions are obtained from a Bacillus thuringiensis cryIIIA gene (WO94/25612) and a Bacillus subtilis SP82 gene (Hue et al., 1995, Journal of Bacteriology 177: 3465-3471).

[0106] The control sequence may also be a suitable leader sequence, when transcribed is a nontranslated region of an mRNA that is important for translation by the host cell. The leader sequence is operably linked to the 5′-terminus of the polynucleotide encoding the polypeptide. Any leader sequence that is functional in the yeast cell of choice may be used.

[0107] Suitable leaders for yeast host cells are obtained from the genes for enolase (e.g., S. cerevisiae or I. orientalis enolase (ENO-1)), 3-phosphoglycerate kinase (e.g., S. cerevisiae or I. orientalis 3-phosphoglycerate kinase), alpha-factor (e.g., S. cerevisiae or I. orientalis alpha-factor), and alcohol dehydrogenase/glyceraldehyde-3-phosphate dehydrogenase (e.g., S. cerevisiae or I. orientalis alcohol dehydrogenase/glyceraldehyde-3-phosphate dehydrogenase (ADH2/GAP)).

[0108] The control sequence may also be a polyadenylation sequence; a sequence operably linked to the 3′-terminus of the polynucleotide and, when transcribed, is recognized by the host cell as a signal to add polyadenosine residues to transcribed mRNA. Any polyadenylation sequence that is functional in the host cell of choice may be used. Useful polyadenylation sequences for yeast cells are described by Guo and Sherman, 1995, Mol. Cellular Biol. 15: 5983-5990.

[0109] The control sequence may also be a signal peptide coding region that encodes a signal peptide linked to the N-terminus of a polypeptide and directs the polypeptide into the cell's secretory pathway. The 5′-end of the coding sequence of the polynucleotide may inherently contain a signal peptide coding sequence naturally linked in translation reading frame with the segment of the coding sequence that encodes the polypeptide. Alternatively, the 5′-end of the coding sequence may contain a signal peptide coding sequence that is foreign to the coding sequence. A foreign signal peptide coding sequence may be required where the coding sequence does not naturally contain a signal peptide coding sequence. Alternatively, a foreign signal peptide coding sequence may simply replace the natural signal peptide coding sequence in order to enhance secretion of the polypeptide. However, any signal peptide coding sequence that directs the expressed polypeptide into the secretory pathway of a host cell may be used. Useful signal peptides for yeast host cells are obtained from the genes for Saccharomyces cerevisiae alpha-factor and Saccharomyces cerevisiae invertase. Other useful signal peptide coding sequences are described by Romanos et al., 1992, supra.

[0110] The control sequence may also be a propeptide coding sequence that encodes a propeptide positioned at the N-terminus of a polypeptide. The resultant polypeptide is known as a proenzyme or propolypeptide (or a zymogen in some cases). A propolypeptide is generally inactive and can be converted to an active polypeptide by catalytic or autocatalytic cleavage of the propeptide from the propolypeptide. The propeptide coding sequence may be obtained from the genes for Bacillus subtilis alkaline protease (aprE), Bacillus subtilis neutral protease (nprT), Myceliophthora thermophila laccase (WO 95/33836), Rhizomucor miehei aspartic proteinase, and Saccharomyces cerevisiae alpha-factor.

[0111] Where both signal peptide and propeptide sequences are present, the propeptide sequence is positioned next to the N-terminus of a polypeptide and the signal peptide sequence is positioned next to the N-terminus of the propeptide sequence.

[0112] It may also be desirable to add regulatory sequences that allow the regulation of the expression of the polypeptide relative to the growth of the host cell. Examples of regulatory systems are those that cause the expression of the gene to be turned on or off in response to a chemical or physical stimulus, including the presence of a regulatory compound. Regulatory systems in prokaryotic systems include the lac, tac, and trp operator systems. In yeast, the ADH2 system or GAL1 system may be used.

[0113] The vectors may contain one or more (e.g., two, several) selectable markers that permit easy selection of transformed, transfected, transduced, or the like cells. A selectable marker is a gene the product of which provides for biocide or viral resistance, resistance to heavy metals, prototrophy to auxotrophs, and the like. Suitable markers for yeast host cells include, but are not limited to, ADE2, HIS3, LEU2, LYS2, MET3, TRP1, and URA3.

[0114] The vectors may contain one or more (e.g., two, several) elements that permit integration of the vector into the host cell's genome or autonomous replication of the vector in the cell independent of the genome.

[0115] For integration into the host cell genome, the vector may rely on the polynucleotide's sequence encoding the polypeptide or any other element of the vector for integration into the genome by homologous or non-homologous recombination. Alternatively, the vector may contain additional polynucleotides for directing integration by homologous recombination into the genome of the host cell at a precise location(s) in the chromosome(s). To increase the likelihood of integration at a precise location, the integrational elements should contain a sufficient number of nucleic acids, such as 100 to 10,000 base pairs, 400 to 10,000 base pairs, and 800 to 10,000 base pairs, which have a high degree of sequence identity to the corresponding target sequence to enhance the probability of homologous recombination. The integrational elements may be any sequence that is homologous with the target sequence in the genome of the host cell. Furthermore, the integrational elements may be non-encoding or encoding polynucleotides. On the other hand, the vector may be integrated into the genome of the host cell by non-homologous recombination. Potential integration loci include those described in the art (e.g., See US2012/0135481).

[0116] For autonomous replication, the vector may further comprise an origin of replication enabling the vector to replicate autonomously in the yeast cell. The origin of replication may be any plasmid replicator mediating autonomous replication that functions in a cell. The term “origin of replication” or “plasmid replicator” means a polynucleotide that enables a plasmid or vector to replicate in vivo. Examples of origins of replication for use in a yeast host cell are the 2 micron origin of replication, ARS1, ARS4, the combination of ARS1 and CEN3, and the combination of ARS4 and CEN6.

[0117] More than one copy of a polynucleotide described herein may be inserted into a host cell to increase production of a polypeptide. An increase in the copy number of the polynucleotide can be obtained by integrating at least one additional copy of the sequence into the yeast cell genome or by including an amplifiable selectable marker gene with the polynucleotide where cells containing amplified copies of the selectable marker gene, and thereby additional copies of the polynucleotide, can be selected for by cultivating the cells in the presence of the appropriate selectable agent.

[0118] The procedures used to ligate the elements described above to construct the recombinant expression vectors described herein are well known to one skilled in the art (See, e.g., Sambrook et al., 1989, supra).

[0119] Additional procedures and techniques known in the art for the preparation of recombinant cells for ethanol fermentation, are described in, e.g., WO2016/045569, the content of which is hereby incorporated by reference.

[0120] The fermenting organism may be in the form of a composition comprising a fermenting organism (e.g., a yeast strain described herein) and a naturally occurring and/or a non-naturally occurring component.

[0121] The fermenting organism described herein may be in any viable form, including crumbled, dry, including active dry and instant, compressed, cream (liquid) form etc. In one embodiment, the fermenting organism (e.g., a Saccharomyces cerevisiae yeast strain) is dry yeast, such as active dry yeast or instant yeast. In one embodiment, the fermenting organism (e.g., a Saccharomyces cerevisiae yeast strain) is crumbled yeast. In one embodiment, the fermenting organism (e.g., a Saccharomyces cerevisiae yeast strain) is compressed yeast. In one embodiment, the fermenting organism (e.g., a Saccharomyces cerevisiae yeast strain) is cream yeast.

[0122] In one embodiment is a composition comprising a fermenting organism described herein (e.g., a Saccharomyces cerevisiae yeast strain), and one or more of the component selected from the group consisting of: surfactants, emulsifiers, gums, swelling agent, and antioxidants and other processing aids.

[0123] The compositions described herein may comprise a fermenting organism described herein (e.g., a Saccharomyces cerevisiae yeast strain) and any suitable surfactants. In one embodiment, the surfactant(s) is/are an anionic surfactant, cationic surfactant, and/or nonionic surfactant.

[0124] The compositions described herein may comprise a fermenting organism described herein (e.g., a Saccharomyces cerevisiae yeast strain) and any suitable emulsifier. In one embodiment, the emulsifier is a fatty-acid ester of sorbitan. In one embodiment, the emulsifier is selected from the group of sorbitan monostearate (SMS), citric acid esters of monodiglycerides, polyglycerolester, fatty acid esters of propylene glycol.

[0125] In one embodiment, the composition comprises a fermenting organism described herein (e.g., a Saccharomyces cerevisiae yeast strain), and Olindronal SMS, Olindronal SK, or Olindronal SPL including composition concerned in European Patent No. 1,724,336 (hereby incorporated by reference). These products are commercially available from Bussetti, Austria, for active dry yeast.

[0126] The compositions described herein may comprise a fermenting organism described herein (e.g., a Saccharomyces cerevisiae yeast strain) and any suitable gum. In one embodiment, the gum is selected from the group of carob, guar, tragacanth, arabic, xanthan and acacia gum, in particular for cream, compressed and dry yeast.

[0127] The compositions described herein may comprise a fermenting organism described herein (e.g., a Saccharomyces cerevisiae yeast strain) and any suitable swelling agent. In one embodiment, the swelling agent is methyl cellulose or carboxymethyl cellulose.

[0128] The compositions described herein may comprise a fermenting organism described herein (e.g., a Saccharomyces cerevisiae yeast strain) and any suitable anti-oxidant. In one embodiment, the antioxidant is butylated hydroxyanisol (BHA) and/or butylated hydroxytoluene (BHT), or ascorbic acid (vitamin C), particular for active dry yeast.

### Transporters/Permeases

[0129] In some embodiments, the fermenting organism (e.g., recombinant yeast cell) comprises a genetic modification that increases or decreases expression of a transporter/permease. The transporter may be any transporter that is suitable for improved nitrogen utilization of the fermenting organisms, such as a naturally occurring transporter (e.g., a native transporter from another species or an endogenous transporter expressed from a modified expression vector) or a variant thereof that retains transporter activity.

[0130] The transporters/permeases include, e.g., amino acid transporters, peptide transporters (such as any polypeptide capable of transporting dipeptides, tripeptides, and/or oligopeptides (n>3)), mitochondrial transporters, vacuole transporters, and ammonium permeases.

[0131] Transporter/permease activity can be measured using any suitable assay known in the art.

[0132] In some embodiments, the genetic modification is a heterologous polynucleotide encoding a transporter/permease.

[0133] In some embodiments, the fermenting organism has an increased level of transporter activity compared to the fermenting organism without the genetic modification, when cultivated under the same conditions. In some embodiments, the fermenting organism has an increased level of transporter activity of at least 5%, e.g., at least 10%, at least 15%, at least 20%, at least 25%, at least 50%, at least 100%, at least 150%, at least 200%, at least 300%, or at 500% compared to the fermenting organism without the genetic modification, when cultivated under the same conditions.

[0134] In some embodiments, the fermenting organism has increased or decreased expression of a transporter when compared to Saccharomyces cerevisiae strain Ethanol Red® (ER; deposited under Accession No. V14/007039 at National Measurement Institute, Victoria, Australia) under the same conditions. In some embodiments, the fermenting organism has an increased expression of at least 5%, e.g., at least 10%, at least 15%, at least 20%, at least 25%, at least 50%, at least 100%, at least 150%, at least 200%, at least 300%, or at 500% compared to Saccharomyces cerevisiae strain Ethanol Red® (ER; deposited under Accession No. V14/007039 at National Measurement Institute, Victoria, Australia) under the same conditions (e.g., under conditions described herein, such as on or after 53 hours fermentation).

[0135] Exemplary transporters that may be expressed with the fermenting organisms and methods of use described herein include, but are not limited to, transporters shown in Table 1 (or derivatives thereof).

TABLE 1

| | | | Coding | Transporter |
|---|---|---|---|---|
| | | Gene | SEQ ID | SEQ ID |
| | Description | reference | NO. | NO. |
| 1 | Amino Acid Permease | DAA07460.1 | 1 | 86 |
| | | (AGP1) | | |
| 2 | Amino Acid Permease | CAA85012.1 | 2 | 87 |
| | | (BAP2) | | |
| 3 | Amino Acid Permease | CAA52970.1 | 3 | 88 |
| | | (BAP3) | | |
| 4 | Amino Acid Permease | AAB48002.1 | 4 | 89 |
| | | (GNP1) | | |
| 5 | Amino Acid Permease | AAA50552.1 | 5 | 90 |
| | | (TAT1) | | |
| 6 | Amino Acid Permease | CAA55777.1 | 6 | 91 |
| | | (TAT2) | | |
| 7 | Amino Acid Permease | CAA36858.1 | 7 | 92 |
| | | (GAP1) | | |
| 8 | Amino Acid Permease | AAA34673.1 | 8 | 93 |
| | | (HIP1) | | |
| 9 | Amino Acid Permease | CAA97514.1 | 9 | 94 |
| | | (MMP1) | | |
| 10 | Amino Acid Permease | CAA98010.1 | 10 | 95 |
| | | (SAM3) | | |
| 11 | Amino Acid Permease | CAA27416.1 | 11 | 96 |
| | | (CAN1) | | |
| 12 | Amino Acid Permease | CAA52199.1 | 12 | 97 |
| | | (ALP1) | | |
| 13 | Amino Acid Permease | CAA47729.1 | 13 | 98 |
| | | (LYP1) | | |
| 14 | Amino Acid Permease | AAA34925.1 | 14 | 99 |
| | | (PUT4) | | |
| 15 | Amino Acid Permease | CAA65074.1 | 15 | 100 |
| | | (DIP5) | | |
| 16 | Amino Acid Permease | CAA90380.1 | 16 | 101 |
| | | (SSY1) | | |
| 17 | Amino Acid Permease | CAA53491.1 | 17 | 102 |
| | | (AGP2) | | |
| 18 | Amino Acid Permease | BAA09186.1 | 18 | 103 |
| | | (AGP3) | | |
| 19 | Amino Acid Permease | AAB63529.1 | 19 | 104 |
| | | (MUP1) | | |
| 20 | Amino Acid Permease | AAB65048.1 | 20 | 105 |
| | | (MUP3) | | |
| 21 | Amino Acid Permease | CAA47101.1 | 21 | 106 |
| | | (UGA4) | | |
| 22 | Amino Acid Permease | CAA81512.1 | 22 | 107 |
| | | (TPO5) | | |
| 23 | Amino Acid Permease | AAA34537.1 | 23 | 108 |
| | | (HNM1) | | |
| 24 | Amino Acid Permease | AAB50012.1 | 24 | 109 |
| | | (BIO5) | | |
| 25 | Ammonium Permease | CAA54699.1 | 25 | 110 |
| | | (MEP1) | | |
| 26 | Ammonium Permease | CAA58587.1 | 26 | 111 |
| | | (MEP2) | | |
| 27 | Ammonium Permease | AAB68278.1 | 27 | 112 |
| | | (MEP3) | | |
| 28 | Other | AAA34555.1 | 28 | 113 |
| | Transporters/Permease | (DAL5) | | |
| 29 | Other | CAA88002.1 | 29 | 114 |
| | Transporters/Permease | (YCT1) | | |
| 30 | Other | CAA69082.1 | 30 | 115 |
| | Transporters/Permease | (TNA1) | | |
| 31 | Other | CAA97067.1 | 31 | 116 |
| | Transporters/Permease | (VHT1) | | |
| 32 | Other | CAA42320.1 | 32 | 117 |
| | Transporters/Permease | (FEN2) | | |
| 33 | Other | AAC04968.1 | 33 | 118 |
| | Transporters/Permease | (SEO1) | | |
| 34 | Other | CAA53678.1 | 34 | 119 |
| | Transporters/Permease | (FUR4) | | |
| 35 | Other | CAA78826.1 | 35 | 120 |
| | Transporters/Permease | (DAL4) | | |
| 36 | Other | CAA55059.1 | 36 | 121 |
| | Transporters/Permease | (FUI1) | | |
| 37 | Other | AAB67405.1 | 37 | 122 |
| | Transporters/Permease | (THI7) | | |
| 38 | Other | CAA99401.1 | 38 | 123 |
| | Transporters/Permease | (THI72) | | |
| 39 | Other | CAA94556.1 | 39 | 124 |
| | Transporters/Permease | (NRT1) | | |
| 40 | Other | CAA36040.1 | 40 | 125 |
| | Transporters/Permease | (FCY2) | | |
| 41 | Other | CAA62788.1 | 41 | 126 |
| | Transporters/Permease | (TPN1) | | |
| 42 | Other | AAA34582.1 | 42 | 127 |
| | Transporters/Permease | (DUR3) | | |
| 43 | Other | AAC37368.1 | 43 | 128 |
| | Transporters/Permease | (PTR2) | | |
| 44 | Other | CAA83999.1 | 44 | 129 |
| | Transporters/Permease | (OPT1) | | |
| 45 | Other | AAB64623.1 | 45 | 130 |
| | Transporters/Permease | (OPT2) | | |
| 46 | Other | AAB64820.1 | 46 | 131 |
| | Transporters/Permease | (ATO3) | | |
| 47 | Other | AAA99646.1 | 47 | 132 |
| | Transporters/Permease | (AQR1) | | |
| 48 | Other | CAA97477.1 | 48 | 133 |
| | Transporters/Permease | (TPO1) | | |
| 49 | Mitochondrial | CAA95017.1 | 49 | 134 |
| | Transporter | (AGC1) | | |
| 50 | Mitochondrial | AAB68225.1 | 50 | 135 |
| | Transporter | (ODC1) | | |
| 51 | Mitochondrial | CAA63185.1 | 51 | 136 |
| | Transporter | (ODC2) | | |
| 52 | Mitochondrial | CAA60862.1 | 52 | 137 |
| | Transporter | (ORT1) | | |
| 53 | Mitochondrial | AAC48984.1 | 53 | 138 |
| | Transporter | (CTP1) | | |
| 54 | Mitochondrial | AAA34886.1 | 54 | 139 |
| | Transporter | (OAC1) | | |
| 55 | Mitochondrial | CAA56013.1 | 55 | 140 |
| | Transporter | (AVT5) | | |
| 56 | Mitochondrial | AAB68424.1 | 56 | 141 |
| | Transporter | (LEU5) | | |
| 57 | Mitochondrial | CAA47602.1 | 57 | 142 |
| | Transporter | (YMC1) | | |
| 58 | Mitochondrial | CAA55607.1 | 58 | 143 |
| | Transporter | (YMC2) | | |
| 59 | Mitochondrial | AAA64802.1 | 59 | 144 |
| | Transporter | (PET8) | | |
| 60 | Vacuole Transporter | CAA60922.1 | 60 | 145 |
| | | (AVT1) | | |
| 61 | Vacuole Transporter | AAB65023.1 | 61 | 146 |
| | | (AVT2) | | |
| 62 | Vacuole Transporter | CAA81508.1 | 62 | 147 |
| | | (AVT3) | | |
| 63 | Vacuole Transporter | CAA90525.1 | 63 | 148 |
| | | (AVT4) | | |
| 64 | Vacuole Transporter | CAA56013.1 | 64 | 149 |
| | | (AVT5) | | |
| 65 | Vacuole Transporter | AAC03217.1 | 65 | 150 |
| | | (AVT6) | | |
| 66 | Vacuole Transporter | CAA86706.1 | 66 | 151 |
| | | (AVT7) | | |
| 67 | Vacuole Transporter | CAA89235.1 | 67 | 152 |
| | | (VBA1) | | |
| 68 | Vacuole Transporter | CAA85258.1 | 68 | 153 |
| | | (VBA2) | | |
| 69 | Vacuole Transporter | CAA42398.1 | 69 | 154 |
| | | (VBA3) | | |
| 70 | Vacuole Transporter | CAA88672.1 | 70 | 155 |
| | | (VBA4) | | |
| 71 | Vacuole Transporter | CAA82185.1 | 71 | 156 |
| | | (VBA5) | | |
| 72 | Vacuole Transporter | CAA42378.1 | 72 | 157 |
| | | (ATG22) | | |
| 73 | Vacuole Transporter | CAA27416.1 | 73 | 158 |
| | | (CAN1) | | |
| 74 | Vacuole Transporter | CAA47729.1 | 74 | 159 |
| | | (LYP1) | | |
| 75 | Vacuole Transporter | CAA85105.1 | 75 | 160 |
| | | (RTC2) | | |
| 76 | Other | CAA96822.1 | 76 | 161 |
| | Transporters/Permease | (YGL114w) | | |
| 77 | Urea and polyamine | AAA34582.1 | 77 | 162 |
| | transporter | (DUR3) | | |
| 78 | Amino Acid/Auxin | CEP25277.1 | 78 | 163 |
| | Permease (AAAP) | (FOT2) | | |
| 79 | Amino Acid/Auxin | CEP25276.1 | 79 | 164 |
| | Permease (AAAP) | (FOTX) | | |
| 80 | Other | ABD17823.1 | 80 | 165 |
| | Transporters/Permease | (OPT3) | | |
| 81 | Other | AOW30993.1 | 81 | 166 |
| | Transporters/Permease | (OPT4) | | |
| 82 | Other | AOW27826.1 | 82 | 167 |
| | Transporters/Permease | (OPT5) | | |
| 83 | Other | ABD17829.1 | 83 | 168 |
| | Transporters/Permease | (OPT6) | | |
| 84 | Other | ABD17830.1 | 84 | 169 |
| | Transporters/Permease | (OPT7) | | |
| 85 | Other | AOW30319.1 | 85 | 170 |
| | Transporters/Permease | (OPT8) | | |

[0136] Additional polynucleotides encoding suitable transporters may be derived from microorganisms of any suitable genus, including those readily available within the UniProtKB database (www.uniprot.org).

[0137] The transporter may be a bacterial transporter. For example, the transporter may be derived from a Gram-positive bacterium such as a Bacillus, Clostridium, Enterococcus, Geobacillus, Lactobacillus, Lactococcus, Oceanobacillus, Staphylococcus, Streptococcus, or Streptomyces, or a Gram-negative bacterium such as a Campylobacter, E. coli, Flavobacterium, Fusobacterium, Helicobacter, Ilyobacter, Neisseria, Pseudomonas, Salmonella, or Ureaplasma.

[0138] In one embodiment, the transporter is derived from Bacillus alkalophilus, Bacillus amyloliquefaciens, Bacillus brevis, Bacillus circulans, Bacillus clausii, Bacillus coagulans, Bacillus firmus, Bacillus lautus, Bacillus lentus, Bacillus licheniformis, Bacillus megaterium, Bacillus pumilus, Bacillus stearothermophilus, Bacillus subtilis, or Bacillus thuringiensis.

[0139] In another embodiment, the transporter is derived from Streptococcus equisimilis, Streptococcus pyogenes, Streptococcus uberis, or Streptococcus equi subsp. Zooepidemicus.

[0140] In another embodiment, the transporter is derived from Streptomyces achromogenes, Streptomyces avermitilis, Streptomyces coelicolor, Streptomyces griseus, or Streptomyces lividans.

[0141] The transporter may be a fungal transporter. For example, the transporter may be derived from a yeast such as a Candida, Kluyveromyces, Pichia, Saccharomyces, Schizosaccharomyces, Yarrowia or Issatchenkia; or derived from a filamentous fungus such as an Acremonium, Agaricus, Alternaria, Aspergillus, Aureobasidium, Botryosphaeria, Ceriporiopsis, Chaetomidium, Chrysosporium, Claviceps, Cochliobolus, Coprinopsis, Coptotermes, Corynascus, Cryphonectria, Cryptococcus, Diplodia, Exidia, Filibasidium, Fusarium, Gibberella, Holomastigotoides, Humicola, Irpex, Lentinula, Leptospaeria, Magnaporthe, Melanocarpus, Meripilus, Mucor, Myceliophthora, Neocallimastix, Neurospora, Paecilomyces, Penicillium, Phanerochaete, Piromyces, Poitrasia, Pseudoplectania, Pseudotrichonympha, Rhizomucor, Schizophyllum, Scytalidium, Talaromyces, Thermoascus, Thielavia, Tolypocladium, Trichoderma, Trichophaea, Verticillium, Volvariella, or Xylaria.

[0142] In another embodiment, the transporter is derived from Saccharomyces carlsbergensis, Saccharomyces cerevisiae, Saccharomyces diastaticus, Saccharomyces douglasii, Saccharomyces kluyveri, Saccharomyces norbensis, or Saccharomyces oviformis.

[0143] In one embodiment, the transporter is derived from Torulaspora, such as the Torulaspora microellipsoides AAAP transporters of SEQ ID NO: 163 or SEQ ID NO: 164.

[0144] In another embodiment, the transporter is derived from Acremonium cellulolyticus, Aspergillus aculeatus, Aspergillus awamori, Aspergillus foetidus, Aspergillus fumigatus, Aspergillus japonicus, Aspergillus nidulans, Aspergillus niger, Aspergillus oryzae, Chrysosporium inops, Chrysosporium keratinophilum, Chrysosporium lucknowense, Chrysosporium merdarium, Chrysosporium pannicola, Chrysosporium queenslandicum, Chrysosporium tropicum, Chrysosporium zonatum, Fusarium bactridioides, Fusarium cerealis, Fusarium crookwellense, Fusarium culmorum, Fusarium graminearum, Fusarium graminum, Fusarium heterosporum, Fusarium negundi, Fusarium oxysporum, Fusarium reticulatum, Fusarium roseum, Fusarium sambucinum, Fusarium sarcochroum, Fusarium sporotrichioides, Fusarium suiphureum, Fusarium torulosum, Fusarium trichothecioides, Fusarium venenatum, Humicola grisea, Humicola insolens, Humicola lanuginosa, Irpex lacteus, Mucor miehei, Myceliophthora thermophila, Neurospora crassa, Penicillium funiculosum, Penicillium purpurogenum, Phanerochaete chrysosporium, Thielavia achromatica, Thielavia albomyces, Thielavia albopilosa, Thielavia australeinsis, Thielavia fimeti, Thielavia microspora, Thielavia ovispora, Thielavia peruviana, Thielavia setosa, Thielavia spededonium, Thielavia subthermophila, Thielavia terrestris, Trichoderma harzianum, Trichoderma koningii, Trichoderma Iongibrachiatum, Trichoderma reesei, or Trichoderma viride.

[0145] It will be understood that for the aforementioned species, the invention encompasses both the perfect and imperfect states, and other taxonomic equivalents, e.g., anamorphs, regardless of the species name by which they are known. Those skilled in the art will readily recognize the identity of appropriate equivalents.

[0146] Strains of these species are readily accessible to the public in a number of culture collections, such as the American Type Culture Collection (ATCC), Deutsche Sammlung von Mikroorganismen und Zellkulturen GmbH (DSMZ), Centraalbureau Voor Schimmelcultures (CBS), and Agricultural Research Service Patent Culture Collection, Northern Regional Research Center (NRRL).

### Amino Acid/Auxin Permeases

[0147] As described in the Examples below, the Applicant has found that Amino Acid/Auxin Permeases (AAAPs) enable yeast to access and uptake more amino nitrogen during corn mash fermentation (e.g., under low urea conditions) which leads to improved fermentation performance. As stated supra, AAAP family proteins are classified as TC #2.A.18 in the Transporter Classification Database (TCDB). AAAP family proteins originate in eukaryotes and typically 400-500 residues in length. Most of the size variation occurs as a result of the presence of long N-terminal hydrophilic extensions in some of the proteins. These proteins exhibit 11 (or 10) putative transmembrane α-helical spanners. Additional characterization of AAAPs are known in the art, e.g., Young et al., 1999, Biochimica et Biophysica Acta 1415: 306-322. Structure-function studies of AAAP proteins have been described, e.g., Swarup et al., 2004, The Plant Cell 16: 3069-3083.

[0148] Following Applicant's discovery that yeast expression of Amino Acid/Auxin Permeases FOT2 and FOTX provides improved nitrogen uptake and fermentation performance (See, Examples 1-7), the Applicant further demonstrated performance on a collection of yeast expressing numerous of other Amino Acid/Auxin Permeases (See, Table 2 and Examples 8-12). Accordingly, in some embodiments, the transporter described herein is an Amino Acid/Auxin Permease (AAAP).

[0149] Exemplary Amino Acid/Auxin Permeases that may be expressed with the fermenting organisms and methods of use described herein include, but are not limited to, AAAPs shown in Table 2 below (or derivatives thereof).

TABLE 2

| | | | Coding | AAAP |
|---|---|---|---|---|
| | | Gene | SEQ ID | SEQ ID |
| | Source Organism | reference | NO. | NO. |
| 1 | Torulaspora | CEP25277.1 | 78 | 163 |
| | microellipsoides | (FOT2) | | |
| 2 | Torulaspora | CEP25276.1 | 79 | 164 |
| | microellipsoides | (FOTX) | | |
| 3 | Zygosaccharomyces bailii | A0A212MGL7 | 322 | 432 |
| 4 | Zygosaccharomyces | EFPBZZ5FS | 323 | 433 |
| | kombuchaensis | | | |
| 5 | Lachancea fermentati | A0A1G4MGH9 | 324 | 434 |
| 6 | Zygotorulaspora florentina | Zflorentina | 325 | 435 |
| 7 | Zygosaccharomyces rouxii | A0A1Q3ALJ6 | 326 | 436 |
| 8 | Zygosaccharomyces rouxii | C5DZS0 | 327 | 437 |
| 9 | Lachancea cidri | EFP6BNQFG | 328 | 438 |
| 10 | Zygosaccharomyces | EFPC3P5VG | 329 | 439 |
| | pseudobailii | | | |
| 11 | Torulaspora delbrueckii | EFPBZ6NGV | 330 | 440 |
| 12 | Lachancea meyersii | A0A1G4JE54 | 331 | 441 |
| 13 | Lachancea nothofagi | A0A1G4JL69 | 332 | 442 |
| 14 | Lachancea mirantina | A0A1G4J6B8 | 333 | 443 |
| 15 | Lachancea sp | A0A1G4JPN3 | 334 | 444 |
| 16 | Lachancea lanzarotensis | A0A0C7N6P2 | 335 | 445 |
| 17 | Lachancea dasiensis | A0A1G4J939 | 336 | 446 |
| 18 | Wickerhamiella domercqiae | EFP5NS7WC | 337 | 447 |
| 19 | Wickerhamiella sorbophila | A0A2T0FKZ8 | 338 | 448 |
| 20 | Pichia manshurica | EFP1D624N3 | 339 | 449 |
| 21 | Pichia membranifaciens | A0A1E3NDG2 | 340 | 450 |
| 22 | Candida apicola | EFP47XNK4 | 341 | 451 |
| 23 | Starmerella bombicola | EFP3SBJ79 | 342 | 452 |
| 24 | Starmerella bacillaris | EFP91WKVB | 343 | 453 |
| 25 | Leucosporidium | A0A1Y2FA00 | 344 | 454 |
| | creatinivorum | | | |
| 26 | Rhodotorula graminis | EFP58RS8G | 345 | 455 |
| 27 | Rhodosporidium toruloides | A0A061BKL7 | 346 | 456 |
| 28 | Rhodotorula sp | EFP5PH7FN | 347 | 457 |
| 29 | Microbotryum lychnidis | U5H9G8 | 348 | 458 |
| 30 | Auricularia auricula | EFP7WXHH1 | 349 | 459 |
| 31 | Jaapia argillacea | A0A067PLG1 | 350 | 460 |
| 32 | Gloeophyllum odoratum | EFP1CXBWDG | 351 | 461 |
| 33 | Trichaptum abietinum | EFP1CJ1MFR | 352 | 462 |
| 34 | Marasmius oreades | EFP1FJKB6 | 353 | 463 |
| 35 | Gymnopus alpinus | EFP10Z4WG | 354 | 464 |
| 36 | Pholiota squarrosa | EFP10S5N8 | 355 | 465 |
| 37 | Agrocybe cylindracea | EFPF6M6L | 356 | 466 |
| 38 | Psilocybe inquilina | EFP5RRR4 | 357 | 467 |
| 39 | Sphaerobolus stellatus | EFP3RL4ZF | 358 | 468 |
| 40 | Mycena chlorophos | EFP6C1R0D | 359 | 469 |
| 41 | Mortierella sossauensis | EFP6MB9TD | 360 | 470 |
| 42 | Mortierella longigemmata | EFP5H88LD | 361 | 471 |
| 43 | Calocera viscosa | A0A167S4F3 | 362 | 472 |
| 44 | Fomitopsis palustris | EFP7J2PXT | 363 | 473 |
| 45 | Antrodia heteromorpha | EFP4KL0ZJ | 364 | 474 |
| 46 | Postia placenta | EFP1D1ZTB3 | 365 | 475 |
| 47 | Sparassis crispa | EFP47LVGV | 366 | 476 |
| 48 | Solicoccozyma terricola | EFP5QPPBF | 367 | 477 |
| 49 | Erythrobasidium | EFP5R5J3V | 368 | 478 |
| | yunnanense | | | |
| 50 | Piloderma croceum | A0A0C3F214 | 369 | 479 |
| 51 | Rhizopogon vinicolor | A0A1B7MIK0 | 370 | 480 |
| 52 | Suillus brevipes | EFPJW9LJ | 371 | 481 |
| 53 | Boletus edulis | EFP17GTQR | 372 | 482 |
| 54 | Phlebopus portentosus | EFP3FV4PC | 373 | 483 |
| 55 | Pisolithus tinctorius | EFP3S84PX | 374 | 484 |
| 56 | Serpula lacrymans | F8P1Y9 | 375 | 485 |
| 57 | Coniophora arida | EFP1CSBN5K | 376 | 486 |
| 58 | Fibularhizoctonia sp | A0A167XE77 | 377 | 487 |
| 59 | Umbelopsis versiformis | EFP9DLH6H | 378 | 488 |
| 60 | Basidiobolus | EFP2R5KD1 | 379 | 489 |
| | meristosporus | | | |
| 61 | Sphaerobolus stellatus | A0A0C9VC65 | 380 | 490 |
| 62 | Scytalidium sp | EFP2WBJK7 | 381 | 491 |
| 63 | Amorphotheca resinae | EFP1D25MFH | 382 | 492 |
| 64 | Botrytis paeoniae | EFP486ZN4 | 383 | 493 |
| 65 | Monilinia fructicola | EFP2NB535 | 384 | 494 |
| 66 | Rutstroemia sp | A0A2S7QZC8 | 385 | 495 |
| 67 | Pichia membranifaciens | EFP1D62979 | 386 | 496 |
| 68 | Pichia manshurica | EFP1D626D2 | 387 | 497 |
| 69 | Candida ethanolica | EFP6BJ66Q | 388 | 498 |
| 70 | Pichia kluyveri | EFP8D4WVW | 389 | 499 |
| 71 | Saccharomycopsis malanga | EFP5ND1MZ | 390 | 500 |
| 72 | Schwanniomyces | EFP6RN4MJ | 391 | 501 |
| | occidentalis | | | |
| 73 | Zygoascus meyerae | EFP3X7JM3 | 392 | 502 |
| 74 | Meliniomyces variabilis | A0A2J6SB57 | 393 | 503 |
| 75 | Cadophora malorum | EFPCQ67N | 394 | 504 |
| 76 | Aureobasidium | EFP8FPW55 | 395 | 505 |
| | melanogenum | | | |
| 77 | Daldinia fissa | EFPCJGTM | 396 | 506 |
| 78 | Monilinia fructicola | EFP2NB1FW | 397 | 507 |
| 79 | Trypethelium eluteriae | EFP177TX2 | 398 | 508 |
| 80 | Cladonia uncialis | EFPBZC0R5 | 399 | 509 |
| 81 | Mollisia sp | EFP7W35XH | 400 | 510 |
| 82 | Pseudeurotium bakeri | EFPD1N9R | 401 | 511 |
| 83 | Acidomyces richmondensis | A0A150US26 | 402 | 512 |
| 84 | Hamigera striata | EFP2N99N4 | 403 | 513 |
| 85 | Phaeoacremonium scolyti | EFP5DHTC7 | 404 | 514 |
| 86 | Ophiostoma quercus | EFP5DH8ZN | 405 | 515 |
| 87 | Talaromyces variabilis | EFP1FVKFW | 406 | 516 |
| 88 | Talaromyces sp | EFP6L97GW | 407 | 517 |
| 89 | Talaromyces calidicanius | EFP3DBP5B | 408 | 518 |
| 90 | Rasamsonia argillacea | EFP21MPCH | 409 | 519 |
| 91 | Byssochlamys spectabilis | EFP1WBVL | 410 | 520 |
| 92 | Penicillium rolfsii | EFPC79LRM | 411 | 521 |
| 93 | Penicillium limosum | EFP644KQ2 | 412 | 522 |
| 94 | Penicillium | EFP2TGWZ1 | 413 | 523 |
| | simplicissimum | | | |
| 95 | Penicillium | EFP7HP1ZJ | 414 | 524 |
| | parviverrucosum | | | |
| 96 | Penicillium sclerotiorum | EFP2T1JMT | 415 | 525 |
| 97 | Penicillium fellutanum | EFPBVJ68T | 416 | 526 |
| 98 | Aspergillus cervinus | EFP3BBR7 | 417 | 527 |
| 99 | Talaromyces variabilis | EFP44W473 | 418 | 528 |
| 100 | Rhytidhysteron rufulum | EFP3B6HRS | 419 | 529 |
| 101 | Leptoxyphium fumago | EFP6PKS23 | 420 | 530 |
| 102 | Cladosporium | EFP9CL953 | 421 | 531 |
| | cladosporioides | | | |
| 103 | Penicillium bilaiae | EFP6T2LDH | 422 | 532 |
| 104 | Gamarada debralockiae | EFPB8Z9TK | 423 | 533 |
| 105 | Pseudocercospora pini | EFP2M1M0N | 424 | 534 |
| 106 | Rachicladosporium | A0A1V8TN71 | 425 | 535 |
| | antarcticum | | | |
| 107 | Taphrina flavorubra | EFP3T7DNC | 426 | 536 |
| 108 | Ustilaginaceae sp | EFP43RBTX | 427 | 537 |
| 109 | Ustilago filiformis | EFP78NDPQ | 428 | 538 |
| 110 | Pseudozyma tsukubaensis | EFP3W0ZV1 | 429 | 539 |
| 111 | Ustilago williamsii | EFP2N7HVQ | 430 | 540 |
| 112 | Yarrowia deformans | EFP5QXTQG | 431 | 541 |

[0150] The Applicant has deciphered that the high-performing Amino Acid/Auxin Permeases of Table 2 comprise one or more of the following motifs:

Motif A:
(SEQ ID NO: 542)
L-[I, L]-T-T-D-[I, V]-L-G-P
Motif B:
(SEQ ID NO: 543)
[V, I]-[F, Y]-[A, S]-[F, Y, W]-G-G
Motif C:
(SEQ ID NO: 544)
E-[M, L]-[A, K, R]-[H, K, N, R]-P-X-[D, E]-F
Motif D:
(SEQ ID NO: 545)
A-X-X-L-Y-[G, S]-N-[I, V]-[A, G, S]-[I, L, V]-
K-X-X-Y

where X=any residue; and where alternative residues at any one position are presented in brackets. Almost all the high-performing Amino Acid/Auxin Permeases of Table 2 include Motifs A-D.

[0151] Accordingly, in one embodiment, the transporter is an Amino Acid/Auxin Permease that comprises one or more of Motifs A-D.

[0152] In one embodiment, the transporter is an Amino Acid/Auxin Permease comprising Motif A: L-[I,L]-T-T-D-[I,V]-L-G-P (SEQ ID NO: 542).

[0153] As shown in the Examples section below, the Applicant has shown that the top 20 AAAP performers of Table 2 include the Motif A2: L-I-T-T-D-I-L-G-P (SEQ ID NO: 546). Analysis of Motif A2 shows that the underlined residues are predicted to line the membrane pore through which transport would occur. The first Ile residue is predicted to be involved in hydrophobic helix-helix interaction. Ther terminal GP residues are predicted to be in a loop that also lines the pore. Accordingly, in one embodiment, the transporter is an Amino Acid/Auxin Permease comprising Motif A2: L-I-T-T-D-I-L-G-P (SEQ ID NO: 546).

[0154] In one embodiment, the transporter is an Amino Acid/Auxin Permease comprising Motif B: [V,I]-[F,Y]-[A,S]-[F,Y,W]-G-G (SEQ ID NO: 543).

[0155] In one embodiment, the transporter is an Amino Acid/Auxin Permease comprising Motif C: E-[M,L]-[A,K, R]-[H,K,N, R]-P-X-[D,E]-F (SEQ ID NO: 544).

[0156] In one embodiment, the transporter is an Amino Acid/Auxin Permease comprising Motif D: A-X-X-L-Y-[G,S]-N-[I,V]-[A,G,S]-[I,L,V]-K-X-X-Y (SEQ ID NO: 545).

[0157] In one embodiment, the transporter is an Amino Acid/Auxin Permease comprising Motif A: L-[I,L]-T-T-D-[I,V]-L-G-P (SEQ ID NO: 542), and Motif B: [V,I]-[F,Y]-[A,S]-[F,Y,W]-G-G (SEQ ID NO: 543). In one particular embodiment, Motif A is Motif A2: L-I-T-T-D-I-L-G-P (SEQ ID NO: 546).

[0158] In one embodiment, the transporter is an Amino Acid/Auxin Permease comprising Motif A: L-[I,L]-T-T-D-[I,V]-L-G-P (SEQ ID NO: 542) and Motif C: E-[M,L]-[A,K,R]-[H,K,N,R]-P-X-[D,E]-F (SEQ ID NO: 544). In one particular embodiment, Motif A is Motif A2: L-I-T-T-D-I-L-G-P (SEQ ID NO: 546).

[0159] In one embodiment, the transporter is an Amino Acid/Auxin Permease comprising Motif A: L-[I,L]-T-T-D-[I,V]-L-G-P (SEQ ID NO: 542) and Motif D: A-X-X-L-Y-[G,S]-N-[I,V]-[A,G,S]-[1,L,V]-K-X-X-Y (SEQ ID NO: 545). In one particular one embodiment, Motif A is Motif A2: L-1-T-T-D-I-L-G-P (SEQ ID NO: 546).

[0160] In one embodiment, the transporter is an Amino Acid/Auxin Permease comprising Motif B: [V,I]-[F,Y]-[A,S]-[F,Y,W]-G-G (SEQ ID NO: 543) and Motif C: E-[M,L]-[A,K,R]-[H,K,N,R]-P-X-[D,E]-F (SEQ ID NO: 544).

[0161] In one embodiment, the transporter is an Amino Acid/Auxin Permease comprising Motif B: [V,I]-[F,Y]-[A,S]-[F,Y,W]-G-G (SEQ ID NO: 543) and Motif D: A-X-X-L-Y-[G,S]-N-[I,V]-[A,G,S]-[I,L,V]-K-X-X-Y (SEQ ID NO: 545).

[0162] In one embodiment, the transporter is an Amino Acid/Auxin Permease comprising Motif C: E-[M,L]-[A,K,R]-[H,K,N,R]-P-X-[D,E]-F (SEQ ID NO: 544) and Motif D: A-X-X-L-Y-[G,S]-N-[1,V]-[A,G,S]-[I,L,V]-K-X-X-Y (SEQ ID NO: 545).

[0163] In one embodiment, the transporter is an Amino Acid/Auxin Permease comprising Motif B: [V,I]-[F,Y]-[A,S]-[F,Y,W]-G-G (SEQ ID NO: 543), Motif C: E-[M,L]-[A,K,R]-[H,K,N,R]-P-X-[D,E]-F (SEQ ID NO: 544) and Motif D: A-X-X-L-Y-[G,S]-N-[I,V]-[A,G,S]-[I,L,V]-K-X-X-Y (SEQ ID NO: 545).

[0164] In one embodiment, the transporter is an Amino Acid/Auxin Permease comprising Motif A: L-[I,L]-T-T-D-[I,V]-L-G-P (SEQ ID NO: 542), Motif C: E-[M,L]-[A,K,R]-[H,K,N,R]-P-X-[D,E]-F (SEQ ID NO: 544) and Motif D: A-X-X-L-Y-[G,S]-N-[I,V]-[A,G,S]-[I,L,V]-K-X-X-Y (SEQ ID NO: 545). In one particular embodiment, Motif A is Motif A2: L-I-T-T-D-I-L-G-P (SEQ ID NO: 546).

[0165] In one embodiment, the transporter is an Amino Acid/Auxin Permease comprising Motif A: L-[I,L]-T-T-D-[I,V]-L-G-P (SEQ ID NO: 542), Motif B: [V,I]-[F,Y]-[A,S]-[F,Y,W]-G-G (SEQ ID NO: 543) and Motif D: A-X-X-L-Y-[G,S]-N-[I,V]-[A,G,S]-[I,L,V]-K-X-X-Y (SEQ ID NO: 545). In one particular embodiment, Motif A is Motif A2: L-I-T-T-D-I-L-G-P (SEQ ID NO: 546).

[0166] In one embodiment, the transporter is an Amino Acid/Auxin Permease comprising Motif A: L-[I,L]-T-T-D-[I,V]-L-G-P (SEQ ID NO: 542), Motif B: [V,I]-[F,Y]-[A,S]-[F,Y,W]-G-G (SEQ ID NO: 543) and Motif C: E-[M,L]-[A,K,R]-[H,K,N,R]-P-X-[D,E]-F (SEQ ID NO: 544). In one particular embodiment, Motif A is Motif A2: L-I-T-T-D-I-L-G-P (SEQ ID NO: 546).

[0167] In one embodiment, the transporter is an Amino Acid/Auxin Permease comprising Motif A: L-[I,L]-T-T-D-[I,V]-L-G-P (SEQ ID NO: 542), Motif B: [V,I]-[F,Y]-[A,S]-[F,Y,W]-G-G (SEQ ID NO: 543), Motif C: E-[M,L]-[A,K,R]-[H,K,N,R]-P-X-[D,E]-F (SEQ ID NO: 544) and Motif D: A-X-X-L-Y-[G,S]-N-[I,V]-[A,G,S]-[I,L,V]-K-X-X-Y (SEQ ID NO: 545). In one particular embodiment, Motif A is Motif A2: L-I-T-T-D-I-L-G-P (SEQ ID NO: 546).

[0168] The transporter coding sequences described or referenced herein, or a subsequence thereof, as well as the transporter described or referenced herein, or a fragment thereof, may be used to design nucleic acid probes to identify and clone DNA encoding a transporter from strains of different genera or species according to methods well known in the art. In particular, such probes can be used for hybridization with the genomic DNA or cDNA of a cell of interest, following standard Southern blotting procedures, in order to identify and isolate the corresponding gene therein. Such probes can be considerably shorter than the entire sequence, but should be at least 15, e.g., at least 25, at least 35, or at least 70 nucleotides in length. Preferably, the nucleic acid probe is at least 100 nucleotides in length, e.g., at least 200 nucleotides, at least 300 nucleotides, at least 400 nucleotides, at least 500 nucleotides, at least 600 nucleotides, at least 700 nucleotides, at least 800 nucleotides, or at least 900 nucleotides in length. Both DNA and RNA probes can be used. The probes are typically labeled for detecting the corresponding gene (for example, with ³²P, ³H, ³⁵S, biotin, or avidin).

[0169] A genomic DNA or cDNA library prepared from such other strains may be screened for DNA that hybridizes with the probes described above and encodes a parent. Genomic or other DNA from such other strains may be separated by agarose or polyacrylamide gel electrophoresis, or other separation techniques. DNA from the libraries or the separated DNA may be transferred to and immobilized on nitrocellulose or other suitable carrier material. In order to identify a clone or DNA that hybridizes with a coding sequence, or a subsequence thereof, the carrier material is used in a Southern blot.

[0170] In one embodiment, the nucleic acid probe is a polynucleotide, or subsequence thereof, that encodes the transporter of any one of SEQ ID NOs: 86-170, SEQ IS Nos: 432-541, or a fragment thereof.

[0171] For purposes of the probes described above, hybridization indicates that the polynucleotide hybridizes to a labeled nucleic acid probe, or the full-length complementary strand thereof, or a subsequence of the foregoing; under very low to very high stringency conditions. Molecules to which the nucleic acid probe hybridizes under these conditions can be detected using, for example, X-ray film. Stringency and washing conditions are defined as described supra.

[0172] In one embodiment, the transporter is encoded by a polynucleotide that hybridizes under at least low stringency conditions, e.g., medium stringency conditions, medium-high stringency conditions, high stringency conditions, or very high stringency conditions with the full-length complementary strand of the coding sequence for any one of the transporters described or referenced herein (e.g., SEQ ID NOs: 1-85 and 322-431). (Sambrook et al., 1989, Molecular Cloning, A Laboratory Manual, 2d edition, Cold Spring Harbor, New York).

[0173] The transporter may also be identified and obtained from other sources including microorganisms isolated from nature (e.g., soil, composts, water, silage, etc.) or DNA samples obtained directly from natural materials (e.g., soil, composts, water, silage, etc.) using the above-mentioned probes. Techniques for isolating microorganisms and DNA directly from natural habitats are well known in the art. The polynucleotide encoding a transporter may then be derived by similarly screening a genomic or cDNA library of another microorganism or mixed DNA sample.

[0174] Once a polynucleotide encoding a transporter has been detected with a suitable probe as described herein, the sequence may be isolated or cloned by utilizing techniques that are known to those of ordinary skill in the art (See, e.g., Sambrook et al., 1989, supra). Techniques used to isolate or clone polynucleotides encoding transporters include isolation from genomic DNA, preparation from cDNA, or a combination thereof. The cloning of the polynucleotides from such genomic DNA can be effected, e.g., by using the well-known polymerase chain reaction (PCR) or antibody screening of expression libraries to detect cloned DNA fragments with shares structural features (See, e.g., Innis et al., 1990, PCR: A Guide to Methods and Application, Academic Press, New York). Other nucleic acid amplification procedures such as ligase chain reaction (LCR), ligated activated transcription (LAT) and nucleotide sequence-based amplification (NASBA) may be used.

[0175] In one embodiment, the transporter comprises or consists of the amino acid sequence of any one of SEQ ID NOs: 86-170 and 432-541 (such as SEQ ID NO: 129, SEQ ID NO: 163 or SEQ ID NO: 164). In another embodiment, the transporter is a fragment of the transporter of any one of SEQ ID NOs: 86-170 and 432-541, such as SEQ ID NO: 129, SEQ ID NO: 163 or SEQ ID NO: 164 (e.g., wherein the fragment has transporter activity). In one embodiment, the number of amino acid residues in the fragment is at least 75%, e.g., at least 80%, 85%, 90%, or 95% of the number of amino acid residues in referenced full length transporter (e.g. any one of SEQ ID NOs: 86-170 and 432-541; such as SEQ ID NO: 129, SEQ ID NO: 163 or SEQ ID NO: 164). In other embodiments, the transporter may comprise the catalytic domain of any transporter described or referenced herein (e.g., the catalytic domain of any one of SEQ ID NOs: 86-170 and 432-541; such as SEQ ID NO: 129, SEQ ID NO: 163 or SEQ ID NO: 164).

[0176] The transporter may be a variant of any one of the transporter described supra (e.g., any one of SEQ ID NOs: 86-170 and 432-541; such as SEQ ID NO: 129, SEQ ID NO: 163 or SEQ ID NO: 164). In one embodiment, the transporter has at least 60%, e.g., at least 65%, 70%, 75%, 80%, 85%, 90%, 95%, 97%, 98%, 99%, or 100% sequence identity to any one of the transporters described supra (e.g., any one of SEQ ID NOs: 86-170 and 432-541; such as SEQ ID NO: 129, SEQ ID NO: 163 or SEQ ID NO: 164).

[0177] In one embodiment, the transporter sequence differs by no more than ten amino acids, e.g., by no more than five amino acids, by no more than four amino acids, by no more than three amino acids, by no more than two amino acids, or by one amino acid from the amino acid sequence of any one of the transporters described supra (e.g., any one of SEQ ID NOs: 86-170 and 432-541; such as SEQ ID NO: 129, SEQ ID NO: 163 or SEQ ID NO: 164). In one embodiment, the transporter has an amino acid substitution, deletion, and/or insertion of one or more (e.g., two, several) of amino acid sequence of any one of the transporters described supra (e.g., any one of SEQ ID NOs: 86-170 and 432-541; such as SEQ ID NO: 129, SEQ ID NO: 163 or SEQ ID NO: 164). In some embodiments, the total number of amino acid substitutions, deletions and/or insertions is not more than 10, e.g., not more than 9, 8, 7, 6, 5, 4, 3, 2, or 1.

[0178] The amino acid changes are generally of a minor nature, that is conservative amino acid substitutions or insertions that do not significantly affect the folding and/or activity of the protein; small deletions, typically of one to about 30 amino acids; small amino-terminal or carboxyl-terminal extensions, such as an amino-terminal methionine residue; a small linker peptide of up to about 20-25 residues; or a small extension that facilitates purification by changing net charge or another function, such as a poly-histidine tract, an antigenic epitope or a binding domain.

[0179] Examples of conservative substitutions are within the group of basic amino acids (arginine, lysine and histidine), acidic amino acids (glutamic acid and aspartic acid), polar amino acids (glutamine and asparagine), hydrophobic amino acids (leucine, isoleucine and valine), aromatic amino acids (phenylalanine, tryptophan and tyrosine), and small amino acids (glycine, alanine, serine, threonine and methionine). Amino acid substitutions that do not generally alter specific activity are known in the art and are described, for example, by H. Neurath and R. L. Hill, 1979, In, The Proteins, Academic Press, New York. The most commonly occurring exchanges are Ala/Ser, Val/Ile, Asp/Glu, Thr/Ser, Ala/Gly, Ala/Thr, Ser/Asn, Ala/Val, Ser/Gly, Tyr/Phe, Ala/Pro, Lys/Arg, Asp/Asn, Leu/Ile, Leu/Val, Ala/Glu, and Asp/Gly.

[0180] Alternatively, the amino acid changes are of such a nature that the physico-chemical properties of the polypeptides are altered. For example, amino acid changes may improve the thermal stability of the transporters, alter the substrate specificity, change the pH optimum, and the like.

[0181] Essential amino acids can be identified according to procedures known in the art, such as site-directed mutagenesis or alanine-scanning mutagenesis (Cunningham and Wells, 1989, Science 244: 1081-1085). In the latter technique, single alanine mutations are introduced at every residue in the molecule, and the resultant mutant molecules are tested for activity to identify amino acid residues that are critical to the activity of the molecule. See also, Hilton et al., 1996, J. Biol. Chem. 271: 4699-4708. The active site or other biological interaction can also be determined by physical analysis of structure, as determined by such techniques as nuclear magnetic resonance, crystallography, electron diffraction, or photoaffinity labeling, in conjunction with mutation of putative contact site amino acids (See, for example, de Vos et al., 1992, Science 255: 306-312; Smith et al., 1992, J. Mol. Biol. 224: 899-904; Wlodaver et al., 1992, FEBS Lett. 309: 59-64). The identities of essential amino acids can also be inferred from analysis of identities with other transporters that are related to the referenced transporter.

[0182] Additional guidance on the structure-activity relationship of the transporters herein can be determined using multiple sequence alignment (MSA) techniques well-known in the art. Based on the teachings herein, the skilled artisan could make similar alignments with any number of transporters described herein or known in the art. Such alignments aid the skilled artisan to determine potentially relevant domains (e.g., binding domains or catalytic domains), as well as which amino acid residues are conserved and not conserved among the different transporter sequences. It is appreciated in the art that changing an amino acid that is conserved at a particular position between disclosed polypeptides will more likely result in a change in biological activity (Bowie et al., 1990, Science 247: 1306-1310: “Residues that are directly involved in protein functions such as binding or catalysis will certainly be among the most conserved”). In contrast, substituting an amino acid that is not highly conserved among the polypeptides will not likely or significantly alter the biological activity.

[0183] Even further guidance on the structure-activity relationship for the skilled artisan can be found in published x-ray crystallography studies known in the art. As noted supra, additional characterization of AAAPs are described, e.g., Young et al., 1999, Biochimica et Biophysica Acta 1415: 306-322. Structure-function analysis is also described, e.g., Swarup et al., 2004, The Plant Cell, 16:3069-3083.

[0184] Single or multiple amino acid substitutions, deletions, and/or insertions can be made and tested using known methods of mutagenesis, recombination, and/or shuffling, followed by a relevant screening procedure, such as those disclosed by Reidhaar-Olson and Sauer, 1988, Science 241: 53-57; Bowie and Sauer, 1989, Proc. Natl. Acad. Sci. USA 86: 2152-2156; WO95/17413; or WO95/22625. Other methods that can be used include error-prone PCR, phage display (e.g., Lowman et al., 1991, Biochemistry 30: 10832-10837; U.S. Pat. No. 5,223,409; WO92/06204), and region-directed mutagenesis (Derbyshire et al., 1986, Gene 46: 145; Ner et al., 1988, DNA 7: 127).

[0185] Mutagenesis/shuffling methods can be combined with high-throughput, automated screening methods to detect activity of cloned, mutagenized polypeptides expressed by host cells (Ness et al., 1999, Nature Biotechnology 17: 893-896). Mutagenized DNA molecules that encode active transporters can be recovered from the host cells and rapidly sequenced using standard methods in the art. These methods allow the rapid determination of the importance of individual amino acid residues in a polypeptide.

[0186] In another embodiment, the heterologous polynucleotide encoding the transporter comprises a coding sequence having at least 60%, e.g., at least 65%, at least 70%, at least 75%, at least 80%, at least 85%, at least 90%, at least 95%, at least 96%, at least 97%, at least 98%, at least 99%, or 100% sequence identity to the coding sequence of any one of the transporters described supra (e.g., any one of SEQ ID NOs: 1-85 and 322-431; such as SEQ ID NO: 44, SEQ ID NO: 78 or SEQ ID NO: 79).

[0187] In one embodiment, the heterologous polynucleotide encoding the transporter comprises or consists of the coding sequence of any one of the transporters described supra (e.g., any one of SEQ ID NOs: 1-85 and 322-431; such as SEQ ID NO: 44, SEQ ID NO: 78 or SEQ ID NO: 79). In another embodiment, the heterologous polynucleotide encoding the transporter comprises a subsequence of the coding sequence of any one of the transporters described supra (e.g., any one of SEQ ID NOs: 1-85 and 322-431; such as SEQ ID NO: 44, SEQ ID NO: 78 or SEQ ID NO: 79) wherein the subsequence encodes a polypeptide having transporter activity. In another embodiment, the number of nucleotides residues in the coding subsequence is at least 75%, e.g., at least 80%, 85%, 90%, or 95% of the number of the referenced coding sequence.

[0188] The referenced coding sequence of any related aspect or embodiment described herein can be the native coding sequence or a degenerate sequence, such as a codon-optimized coding sequence designed for use in a particular host cell (e.g., optimized for expression in Saccharomyces cerevisiae).

[0189] The transporter may be a fused polypeptide or cleavable fusion polypeptide in which another polypeptide is fused at the N-terminus or the C-terminus of the transporter. A fused polypeptide may be produced by fusing a polynucleotide encoding another polypeptide to a polynucleotide encoding the transporter. Techniques for producing fusion polypeptides are known in the art, and include ligating the coding sequences encoding the polypeptides so that they are in frame and that expression of the fused polypeptide is under control of the same promoter(s) and terminator. Fusion proteins may also be constructed using intein technology in which fusions are created post-translationally (Cooper et al., 1993, EMBO J. 12: 2575-2583; Dawson et al., 1994, Science 266: 776-779).

[0190] In some embodiments, the fermenting organism (e.g., recombinant yeast cell) comprises a disruption to an endogenous transporter gene (e.g., any one of the transporter genes shown in Table 1 (e.g., any one of SEQ ID NOs: 1-77 and 80-85) and/or any one of the Amino Acid/Auxin Permease (AAAP) genes shown in Table 2 (e.g., any one of SEQ ID NOs: 78, 79 and 322-431). In some embodiments, the disrupted endogenous transporter gene is inactivated. In another embodiment, the coding sequence of the endogenous gene has at least 60%, e.g., at least 65%, at least 70%, at least 75%, at least 80%, at least 85%, at least 90%, at least 95%, at least 96%, at least 97%, at least 98%, at least 99%, or 100% sequence identity to the coding sequence of any one of the transporters described supra (e.g., any one of SEQ ID NOs: 1-85 and 322-431). In another embodiment, the endogenous gene encodes a transporter having at least 60%, e.g., at least 65%, at least 70%, at least 75%, at least 80%, at least 85%, at least 90%, at least 95%, at least 96%, at least 97%, at least 98%, at least 99%, or 100% sequence identity to the any one of the transporters described supra (e.g., any one of SEQ ID NOs: 86-170 and 432-541).

[0191] The fermenting organisms comprising a gene disruption may be constructed using methods well known in the art, including those methods described herein. A portion of the gene can be disrupted such as the coding region or a control sequence required for expression of the coding region. Such a control sequence of the gene may be a promoter sequence or a functional part thereof, i.e., a part that is sufficient for affecting expression of the gene. For example, a promoter sequence may be inactivated resulting in no expression or a weaker promoter may be substituted for the native promoter sequence to reduce expression of the coding sequence. Other control sequences for possible modification include, but are not limited to, a leader, propeptide sequence, signal sequence, transcription terminator, and transcriptional activator.

[0192] The fermenting organisms comprising a gene disruption may be constructed by gene deletion techniques to eliminate or reduce expression of the gene. Gene deletion techniques enable the partial or complete removal of the gene thereby eliminating their expression. In such methods, deletion of the gene is accomplished by homologous recombination using a plasmid that has been constructed to contiguously contain the 5′ and 3′ regions flanking the gene.

[0193] The fermenting organisms comprising a gene disruption may also be constructed by introducing, substituting, and/or removing one or more (e.g., two, several) nucleotides in the gene or a control sequence thereof required for the transcription or translation thereof. For example, nucleotides may be inserted or removed for the introduction of a stop codon, the removal of the start codon, or a frame-shift of the open reading frame. Such a modification may be accomplished by site-directed mutagenesis or PCR generated mutagenesis in accordance with methods known in the art. See, for example, Botstein and Shortle, 1985, Science 229: 4719; Lo et al., 1985, Proc. Natl. Acad. Sci. U.S.A. 81: 2285; Higuchi et al., 1988, Nucleic Acids Res 16: 7351; Shimada, 1996, Meth. Mol. Biol. 57: 157; Ho et al., 1989, Gene 77: 61; Horton et al., 1989, Gene 77: 61; and Sarkar and Sommer, 1990, BioTechniques 8: 404.

[0194] The fermenting organisms comprising a gene disruption may also be constructed by inserting into the gene a disruptive nucleic acid construct comprising a nucleic acid fragment homologous to the gene that will create a duplication of the region of homology and incorporate construct DNA between the duplicated regions. Such a gene disruption can eliminate gene expression if the inserted construct separates the promoter of the gene from the coding region or interrupts the coding sequence such that a non-functional gene product results. A disrupting construct may be simply a selectable marker gene accompanied by 5′ and 3′ regions homologous to the gene. The selectable marker enables identification of transformants containing the disrupted gene.

[0195] The fermenting organisms comprising a gene disruption may also be constructed by the process of gene conversion (see, for example, Iglesias and Trautner, 1983, Molecular General Genetics 189: 73-76). For example, in the gene conversion method, a nucleotide sequence corresponding to the gene is mutagenized in vitro to produce a defective nucleotide sequence, which is then transformed into the recombinant strain to produce a defective gene.

[0196] By homologous recombination, the defective nucleotide sequence replaces the endogenous gene. It may be desirable that the defective nucleotide sequence also comprises a marker for selection of transformants containing the defective gene.

[0197] The fermenting organisms comprising a gene disruption may be further constructed by random or specific mutagenesis using methods well known in the art, including, but not limited to, chemical mutagenesis (See, e.g., Hopwood, The Isolation of Mutants in Methods in Microbiology (J. R. Norris and D. W. Ribbons, eds.) pp. 363-433, Academic Press, New York, 1970). Modification of the gene may be performed by subjecting the parent strain to mutagenesis and screening for mutant strains in which expression of the gene has been reduced or inactivated. The mutagenesis, which may be specific or random, may be performed, for example, by use of a suitable physical or chemical mutagenizing agent, use of a suitable oligonucleotide, or subjecting the DNA sequence to PCR generated mutagenesis. Furthermore, the mutagenesis may be performed by use of any combination of these mutagenizing methods.

[0198] Examples of a physical or chemical mutagenizing agent suitable for the present purpose include ultraviolet (UV) irradiation, hydroxylamine, N-methyl-N′-nitro-N-nitrosoguanidine (MNNG), N-methyl-N′-nitrosogaunidine (NTG) O-methyl hydroxylamine, nitrous acid, ethyl methane sulphonate (EMS), sodium bisulphite, formic acid, and nucleotide analogues. When such agents are used, the mutagenesis is typically performed by incubating the parent strain to be mutagenized in the presence of the mutagenizing agent of choice under suitable conditions, and selecting for mutants exhibiting reduced or no expression of the gene.

[0199] A nucleotide sequence homologous or complementary to a gene described herein may be used from other microbial sources to disrupt the corresponding gene in a recombinant strain of choice.

[0200] In one embodiment, the modification of a gene in the recombinant cell is unmarked with a selectable marker. Removal of the selectable marker gene may be accomplished by culturing the mutants on a counter-selection medium. Where the selectable marker gene contains repeats flanking its 5′ and 3′ ends, the repeats will facilitate the looping out of the selectable marker gene by homologous recombination when the mutant strain is submitted to counter-selection. The selectable marker gene may also be removed by homologous recombination by introducing into the mutant strain a nucleic acid fragment comprising 5′ and 3′ regions of the defective gene, but lacking the selectable marker gene, followed by selecting on the counter-selection medium. By homologous recombination, the defective gene containing the selectable marker gene is replaced with the nucleic acid fragment lacking the selectable marker gene. Other methods known in the art may also be used.

### Regulators

[0201] In some embodiments, the fermenting organism (e.g., recombinant yeast cell) comprises a genetic modification that increases or decreases expression of a regulator, such as tranporter regulator. Regulators may be any regulator that is suitable for improved nitrogen utilization of the fermenting organisms, such as a naturally occurring regulator (e.g., a native regulator from another species or an endogenous regulator expressed from a modified expression vector) or a variant thereof.

[0202] In some embodiments, the genetic modification is a heterologous polynucleotide encoding a regulator.

[0203] In some embodiments, the fermenting organism has increased or decreased expression of a regulator when compared to Saccharomyces cerevisiae strain Ethanol Red® (ER; deposited under Accession No. V14/007039 at National Measurement Institute, Victoria, Australia) under the same conditions. In some embodiments, the fermenting organism has an increased expression of at least 5%, e.g., at least 10%, at least 15%, at least 20%, at least 25%, at least 50%, at least 100%, at least 150%, at least 200%, at least 300%, or at 500% compared to Saccharomyces cerevisiae strain Ethanol Red® (ER; deposited under Accession No. V14/007039 at National Measurement Institute, Victoria, Australia) under the same conditions.

[0204] Exemplary regulators of transporters that may be expressed with the fermenting organisms and methods of use described herein include, but are not limited to, regulators shown in Table 3 below (or derivatives thereof).

TABLE 3
Regulators

| | | Coding | Regulator |
|---|---|---|---|
| | Gene | SEQ ID | SEQ ID |
| Gene Name | Reference | No. | No. |
| ABF1 | | 171 | 231 |
| ACE2 | | 172 | 232 |
| BUR6 | | 173 | 233 |
| CSE2 | | 174 | 234 |
| GAL11 | | 175 | 235 |
| GCN5 | | 176 | 236 |
| GCR1 | | 177 | 237 |
| HIR3 | | 178 | 238 |
| HSF1 | | 179 | 239 |
| IXR1 | | 180 | 240 |
| MED2 | | 181 | 241 |
| MET32 | | 182 | 242 |
| MET4 | | 183 | 243 |
| MSS11 | | 184 | 244 |
| OAF1 | | 185 | 245 |
| RPN4 | | 186 | 246 |
| RTG3 | | 187 | 247 |
| SFL1 | | 188 | 248 |
| SFP1 | | 189 | 249 |
| SKO1 | | 190 | 250 |
| SPT20 | | 191 | 251 |
| SPT3 | | 192 | 252 |
| SPT7 | | 193 | 253 |
| SRB2 | | 194 | 254 |
| SRB8 | | 195 | 255 |
| SSN2 | | 196 | 256 |
| STP1 | | 197 | 257 |
| SWI4 | | 198 | 258 |
| TYE7 | | 199 | 259 |
| UGA3 | | 200 | 260 |
| UME6 | | 201 | 261 |
| YOX1 | | 202 | 262 |
| CDC28 | | 203 | 263 |
| YAP5 | | 204 | 264 |
| YAP6 | | 205 | 265 |
| CST6 | | 206 | 266 |
| FHL1 | | 207 | 267 |
| GCN4 | AAA34640.1 | 208 | 268 |
| LEU3 | | 209 | 269 |
| MET31 | | 210 | 270 |
| SPN1 | | 211 | 271 |
| SPT6 | | 212 | 272 |
| TFC7 | | 213 | 273 |
| TUP1 | | 214 | 274 |
| WTM1 | | 215 | 275 |
| YAP1 | | 216 | 276 |
| YAP6 | | 217 | 277 |
| CAD1 | | 218 | 278 |
| XBP1 | | 219 | 279 |
| GLN3 | | 220 | 280 |
| RGR1 | | 221 | 281 |
| IXR1 | | 222 | 282 |
| RTC1 | CAA64732.1 | 223 | 283 |
| GAT1 | AAB03516.1 | 224 | 284 |
| CUP9 | AAA66189.1 | 225 | 285 |
| NPR2 | DAA07592.1 | 226 | 286 |
| DAL81 | AAA35192.1 | 227 | 287 |
| DAL82 | CAA38391.1 | 228 | 288 |
| PTR1 | CAA37779.1 | 229 | 289 |
| PTR3 | BAA09268.1 | 230 | 290 |

[0205] Additional polynucleotides encoding suitable regulators may be derived from microorganisms of any suitable genus, including those readily available within the UniProtKB database (www.uniprot.org).

[0206] The regulator may be a regulator from any bacterial or fungal species, as described supra.

[0207] The regulator coding sequences described or referenced herein, or a subsequence thereof, as well as the regulators described or referenced herein, or a fragment thereof, may be used to design nucleic acid probes to identify and clone DNA encoding a regulators from strains of different genera or species as described supra. In one embodiment, the nucleic acid probe is a polynucleotide, or subsequence thereof, that encodes the regulator of any one of SEQ ID NOs: 231-290, or a fragment thereof.

[0208] In one embodiment, the regulator is encoded by a polynucleotide that hybridizes under at least low stringency conditions, e.g., medium stringency conditions, medium-high stringency conditions, high stringency conditions, or very high stringency conditions with the full-length complementary strand of the coding sequence for any one of the regulator described or referenced herein (e.g., SEQ ID NOs: 171-230). (Sambrook et al., 1989, Molecular Cloning, A Laboratory Manual, 2d edition, Cold Spring Harbor, New York).

[0209] The regulator may also be identified and obtained from other sources including microorganisms isolated from nature (e.g., soil, composts, water, silage, etc.) or DNA samples obtained directly from natural materials (e.g., soil, composts, water, silage, etc.) as described supra.

[0210] Once a polynucleotide encoding a regulator has been detected with a suitable probe as described herein, the sequence may be isolated or cloned by utilizing techniques that are known to those of ordinary skill in the art, as described supra.

[0211] In one embodiment, the regulator is a polypeptide that regulates any one of the transporters of Table 1 or Table 2.

[0212] In one embodiment, the regulator comprises or consists of the amino acid sequence of any one of SEQ ID NOs: 231-290. In another embodiment, the regulator is a fragment of the regulator of any one of SEQ ID NOs: 231-290. In one embodiment, the number of amino acid residues in the fragment is at least 75%, e.g., at least 80%, 85%, 90%, or 95% of the number of amino acid residues in referenced full-length regulator (e.g., any one of SEQ ID NOs: 231-290).

[0213] The regulator may be a variant of any one of the regulators described supra (e.g., any one of SEQ ID NOs: 231-290). In one embodiment, the regulator has at least 60%, e.g., at least 65%, 70%, 75%, 80%, 85%, 90%, 95%, 97%, 98%, 99%, or 100% sequence identity to any one of the regulators described supra (e.g., any one of SEQ ID NOs: 231-290).

[0214] In one embodiment, the regulator sequence differs by no more than ten amino acids, e.g., by no more than five amino acids, by no more than four amino acids, by no more than three amino acids, by no more than two amino acids, or by one amino acid from the amino acid sequence of any one of the regulator described supra (e.g., any one of SEQ ID NOs: 231-290). In one embodiment, the regulator has an amino acid substitution, deletion, and/or insertion of one or more (e.g., two, several) of amino acid sequence of any one of the regulators described supra (e.g., any one of SEQ ID NOs: 231-290). In some embodiments, the total number of amino acid substitutions, deletions and/or insertions is not more than 10, e.g., not more than 9, 8, 7, 6, 5, 4, 3, 2, or 1.

[0215] In another embodiment, the heterologous polynucleotide encoding the regulator comprises a coding sequence having at least 60%, e.g., at least 65%, at least 70%, at least 75%, at least 80%, at least 85%, at least 90%, at least 95%, at least 96%, at least 97%, at least 98%, at least 99%, or 100% sequence identity to the coding sequence of any one of the regulators described supra (e.g., any one of SEQ ID NOs: 171-230).

[0216] In one embodiment, the heterologous polynucleotide encoding the regulator comprises or consists of the coding sequence of any one of the regulators described supra (e.g., any one of SEQ ID NOs: 171-230). In another embodiment, the heterologous polynucleotide encoding the regulator comprises a subsequence of the coding sequence of any one of the regulators described supra (e.g., any one of SEQ ID NOs: 171-230). In another embodiment, the number of nucleotides residues in the coding subsequence is at least 75%, e.g., at least 80%, 85%, 90%, or 95% of the number of the referenced coding sequence.

[0217] The referenced coding sequence of any related aspect or embodiment described herein can be the native coding sequence or a degenerate sequence, such as a codon-optimized coding sequence designed for use in a particular host cell (e.g., optimized for expression in Saccharomyces cerevisiae).

[0218] The regulator may be a fused polypeptide or cleavable fusion polypeptide, as described supra. 1993, EMBO J. 12: 2575-2583; Dawson et al., 1994, Science 266: 776-779).

[0219] In some embodiments, the fermenting organism (e.g., recombinant yeast cell) comprises a disruption to an endogenous regulator gene (e.g., any one of the regulator genes shown in Table 3, such as any one of SEQ ID NOs: 171-230). In some embodiments, the disrupted endogenous regulator gene is inactivated. In another embodiment, the coding sequence of the endogenous gene has at least 60%, e.g., at least 65%, at least 70%, at least 75%, at least 80%, at least 85%, at least 90%, at least 95%, at least 96%, at least 97%, at least 98%, at least 99%, or 100% sequence identity to the coding sequence of any one of the regulators described supra (e.g., any one of SEQ ID NOs: 171-230). In another embodiment, the endogenous gene encodes a regulator having at least 60%, e.g., at least 65%, at least 70%, at least 75%, at least 80%, at least 85%, at least 90%, at least 95%, at least 96%, at least 97%, at least 98%, at least 99%, or 100% sequence identity to the any one of the regulators described supra (e.g., any one of SEQ ID NOs: 231-290). Methods of gene disruption are described supra.

### Additional Gene Disruptions

[0220] The fermenting organisms described herein may also comprise one or more (e.g., two, several) gene disruptions, e.g., to divert sugar metabolism from undesired products to ethanol.

[0221] In some aspects, the recombinant host cells produce a greater amount of ethanol compared to the cell without the one or more disruptions when cultivated under identical conditions. In some aspects, one or more of the disrupted endogenous genes is inactivated.

[0222] In certain embodiments, the recombinant cells provided herein comprise a disruption of one or more endogenous genes encoding enzymes involved in producing alternate fermentative products such as glycerol or other byproducts such as acetate or diols. For example, the cells provided herein may comprise a disruption of one or more of glycerol 3-phosphate dehydrogenase (GPD, catalyzes reaction of dihydroxyacetone phosphate to glycerol 3-phosphate), glycerol 3-phosphatase (GPP, catalyzes conversion of glycerol-3 phosphate to glycerol), glycerol kinase (catalyzes conversion of glycerol 3-phosphate to glycerol), dihydroxyacetone kinase (catalyzes conversion of dihydroxyacetone phosphate to dihydroxyacetone), glycerol dehydrogenase (catalyzes conversion of dihydroxyacetone to glycerol), and aldehyde dehydrogenase (ALD, e.g., converts acetaldehyde to acetate). Disruptions to GPD1/GPD2 and GPP1/GPP2 are discussed in, e.g., WO2014/180820 (the sequences of which are incorporated herein by reference). In some embodiments, the recombinant cells provided herein comprise a disruption to an aldose reductase (catalyzes conversion of xylose or xylulose to xylitol; e.g., GRE3 or YPR1; See, Traff et al., 2001, Appl. Environ. Microbiol. 67: 5668-74).

[0223] Modeling analysis can be used to design gene disruptions that additionally optimize utilization of the pathway. One exemplary computational method for identifying and designing metabolic alterations favoring biosynthesis of a desired product is the OptKnock computational framework, Burgard et al., 2003, Biotechnol. Bioeng. 84: 647-657.

[0224] The fermenting organisms comprising a gene disruption may be constructed using methods well known in the art, such as those described supra.

### Methods Using a Starch-Containing Material

[0225] In some aspects, the methods described herein produce a fermentation product from a starch-containing material. Starch-containing material is well-known in the art, containing two types of homopolysaccharides (amylose and amylopectin) and is linked by alpha-(1-4)-D-glycosidic bonds. Any suitable starch-containing starting material may be used. The starting material is generally selected based on the desired fermentation product, such as ethanol. Examples of starch-containing starting materials include cereal, tubers or grains. Specifically, the starch-containing material may be corn, wheat, barley, rye, milo, sago, cassava, tapioca, sorghum, oat, rice, peas, beans, or sweet potatoes, or mixtures thereof. Contemplated are also waxy and non-waxy types of corn and barley.

[0226] In one embodiment, the starch-containing starting material is corn. In one embodiment, the starch-containing starting material is wheat. In one embodiment, the starch-containing starting material is barley. In one embodiment, the starch-containing starting material is rye. In one embodiment, the starch-containing starting material is milo. In one embodiment, the starch-containing starting material is sago. In one embodiment, the starch-containing starting material is cassava. In one embodiment, the starch-containing starting material is tapioca. In one embodiment, the starch-containing starting material is sorghum. In one embodiment, the starch-containing starting material is rice. In one embodiment, the starch-containing starting material is peas. In one embodiment, the starch-containing starting material is beans. In one embodiment, the starch-containing starting material is sweet potatoes. In one embodiment, the starch-containing starting material is oats.

[0227] The methods using a starch-containing material may include a conventional process (e.g., including a liquefaction step described in more detail below) or a raw starch hydrolysis process. In some embodiments using a starch-containing material, saccharification of the starch-containing material is at a temperature above the initial gelatinization temperature. In some embodiments using a starch-containing material, saccharification of the starch-containing material is at a temperature below the initial gelatinization temperature.

### Liquefaction

[0228] In aspects using a starch-containing material, the methods may further comprise a liquefaction step carried out by subjecting the starch-containing material at a temperature above the initial gelatinization temperature to an alpha-amylase and optionally a protease and/or a glucoamylase. Other enzymes such as a pullulanase, endoglucanase, hemicellulase (e.g., xylanase), phospholipase C, and phytase may also be present and/or added in liquefaction. In some embodiments, the liquefaction step is carried out prior to steps a) and b) of the described methods.

[0229] Liquefaction step may be carried out, e.g., for 0.5-5 hours, such as 1-3 hours, such as typically about 2 hours.

[0230] The term “initial gelatinization temperature” means the lowest temperature at which gelatinization of the starch-containing material commences. In general, starch heated in water begins to gelatinize between about 50° C. and 75° C.; the exact temperature of gelatinization depends on the specific starch and can readily be determined by the skilled artisan. Thus, the initial gelatinization temperature may vary according to the plant species, to the particular variety of the plant species as well as with the growth conditions. The initial gelatinization temperature of a given starch-containing material may be determined as the temperature at which birefringence is lost in 5% of the starch granules using the method described by Gorinstein and Lii, 1992, Starch/Stärke 44(12): 461-466.

[0231] Liquefaction is typically carried out at a temperature in the range from 70−100° C. In one embodiment, the temperature in liquefaction is between 75-95° C., such as between 75-90° C., between 80-90° C., or between 82-88° C., such as about 85° C. In one embodiment, the temperature in liquefaction is greater than 85° C., such as about 88° C., about 89° C., about 90° C., about 91° C., about 92° C., about 93° C., about 94° C., or about 95° C.

[0232] A jet-cooking step may be carried out prior to liquefaction in step, for example, at a temperature between 110-145° C., 120-140° C., 125-135° C., or about 130° C. for about 1-15 minutes, for about 3-10 minutes, or about 5 minutes.

[0233] The pH during liquefaction may be e.g., between 4 and 7, such as pH 4.5-6.5, pH 5.0-6.5, pH 5.0-6.0, pH 5.2-6.2, or about 5.2, about 5.4, about 5.6, or about 5.8.

[0234] In one embodiment, the process further comprises, prior to liquifaction, the steps of:

[0235] i) reducing the particle size of the starch-containing material, preferably by dry milling;

[0236] ii) forming a slurry comprising the starch-containing material and water.

[0237] The starch-containing starting material, such as whole grains, may be reduced in particle size, e.g., by milling, in order to open up the structure, to increase surface area, and allowing for further processing. Generally, there are two types of processes: wet and dry milling. In dry milling whole kernels are milled and used. Wet milling gives a good separation of germ and meal (starch granules and protein). Wet milling is often applied at locations where the starch hydrolysate is used in production of, e.g., syrups. Both dry milling and wet milling are well known in the art of starch processing. In one embodiment the starch-containing material is subjected to dry milling. In one embodiment, the particle size is reduced to between 0.05 to 3.0 mm, e.g., 0.1-0.5 mm, or so that at least 30%, at least 50%, at least 70%, or at least 90% of the starch-containing material fit through a sieve with a 0.05 to 3.0 mm screen, e.g., 0.1-0.5 mm screen. In another embodiment, at least 50%, e.g., at least 70%, at least 80%, or at least 90% of the starch-containing material fit through a sieve with #6 screen.

[0238] The aqueous slurry may contain from 10-55 w/w-% dry solids (DS), e.g., 25-45 w/w-% dry solids (DS), or 30-40 w/w-% dry solids (DS) of starch-containing material.

[0239] The alpha-amylase, optionally a protease, and optionally a glucoamylase may initially be added to the aqueous slurry to initiate liquefaction (thinning). In one embodiment, only a portion of the enzymes (e.g., about 1/3) is added to the aqueous slurry, while the rest of the enzymes (e.g., about 2/3) are added during liquefaction step.

[0240] A non-exhaustive list of alpha-amylases used in liquefaction can be found below in the “Alpha-Amylases” section. Examples of suitable proteases used in liquefaction include any protease described in the “Proteases” section. Examples of suitable glucoamylases used in liquefaction include any glucoamylase found in the “Glucoamylases in Liquefaction” section.

### Alpha-Amylases

[0241] An alpha-amylase may be present and/or added in liquefaction optionally together with a protease, phytase, endoglucase, phospholipase C, xylanase, glucoamylase, and/or pullulanase, e.g., as disclosed in WO2012/088303 (Novozymes) or WO2013/082486 (Novozymes) which references are both incorporated by reference.

[0242] In some embodiments, the fermenting organism comprises a heterologous polynucleotide encoding an alpha-amylase, for example, as described in WO2017/087330 or WO2020/023411, the contents of which are hereby incorporated by reference. Any alpha-amylase described or referenced herein is contemplated for expression in the fermenting organism.

[0243] The alpha-amylase may be any alpha-amylase that is suitable for the host cells and/or the methods described herein, such as a naturally occurring alpha-amylase or a variant thereof that retains alpha-amylase activity.

[0244] In some embodiments, the fermenting organism comprising a heterologous polynucleotide encoding an alpha-amylase has an increased level of alpha-amylase activity compared to the host cells without the heterologous polynucleotide encoding the alpha-amylase, when cultivated under the same conditions. In some embodiments, the fermenting organism has an increased level of alpha-amylase activity of at least 5%, e.g., at least 10%, at least 15%, at least 20%, at least 25%, at least 50%, at least 100%, at least 150%, at least 200%, at least 300%, or at 500% compared to the fermenting organism without the heterologous polynucleotide encoding the alpha-amylase, when cultivated under the same conditions.

[0245] Exemplary alpha-amylases that can be used with the host cells and/or the methods described herein include bacterial, yeast, or filamentous fungal alpha-amylases, e.g., derived from any of the microorganisms described or referenced herein.

[0246] The term “bacterial alpha-amylase” means any bacterial alpha-amylase classified under EC 3.2.1.1. A bacterial alpha-amylase used herein may, e.g., be derived from a strain of the genus Bacillus, which is sometimes also referred to as the genus Geobacillus. In one embodiment, the Bacillus alpha-amylase is derived from a strain of Bacillus amyloliquefaciens, Bacillus licheniformis, Bacillus stearothermophilus, or Bacillus subtilis, but may also be derived from other Bacillus sp.

[0247] Specific examples of bacterial alpha-amylases include the Bacillus stearothermophilus alpha-amylase (BSG) of SEQ ID NO: 3 in WO99/19467, the Bacillus amyloliquefaciens alpha-amylase (BAN) of SEQ ID NO: 5 in WO99/19467, and the Bacillus licheniformis alpha-amylase (BLA) of SEQ ID NO: 4 in WO99/19467 (all sequences are hereby incorporated by reference).

[0248] In one embodiment, the alpha-amylase may be an enzyme having a degree of identity of at least 60%, e.g., at least 70%, at least 80%, at least 90%, at least 95%, at least 96%, at least 97%, at least 98% or at least 99% to any of the sequences shown in SEQ ID NOs: 3, 4 or 5, respectively, in WO99/19467.

[0249] In one embodiment, the alpha-amylase may be an enzyme having a degree of identity of at least 60%, e.g., at least 70%, at least 80%, at least 90%, at least 91%, at least 92%, at least 93%, at least 94%, at least 95%, at least 96%, at least 97%, at least 98% or at least 99% to any of the sequences shown in SEQ ID NO: 3 in WO99/19467.

[0250] In one embodiment, the alpha-amylase is derived from Bacillus stearothermophilus. The Bacillus stearothermophilus alpha-amylase may be a mature wild-type or a mature variant thereof. The mature Bacillus stearothermophilus alpha-amylases may naturally be truncated during recombinant production. For instance, the Bacillus stearothermophilus alpha-amylase may be a truncated at the C-terminal, so that it is from 480-495 amino acids long, such as about 491 amino acids long, e.g., so that it lacks a functional starch binding domain (compared to SEQ ID NO: 3 in WO99/19467).

[0251] The Bacillus alpha-amylase may also be a variant and/or hybrid. Examples of such a variant can be found in any of WO96/23873, WO96/23874, WO97/41213, WO99/19467, WO00/60059, and WO02/10355 (each hereby incorporated by reference). Specific alpha-amylase variants are disclosed in U.S. Pat. Nos. 6,093,562, 6,187,576, 6,297,038, and 7,713,723 (hereby incorporated by reference) and include Bacillus stearothermophilus alpha-amylase (often referred to as BSG alpha-amylase) variants having a deletion of one or two amino acids at positions R179, G180, I181 and/or G182, preferably a double deletion disclosed in WO96/23873—See, e.g., page 20, lines 1-10 (hereby incorporated by reference), such as corresponding to deletion of positions 1181 and G182 compared to the amino acid sequence of Bacillus stearothermophilus alpha-amylase set forth in SEQ ID NO: 3 disclosed in WO99/19467 or the deletion of amino acids R179 and G180 using SEQ ID NO: 3 in WO99/19467 for numbering (which reference is hereby incorporated by reference). In some embodiments, the Bacillus alpha-amylases, such as Bacillus stearothermophilus alpha-amylases, have a double deletion corresponding to a deletion of positions 181 and 182 and further optionally comprise a N193F substitution (also denoted 1181*+G182*+N193F) compared to the wild-type BSG alpha-amylase amino acid sequence set forth in SEQ ID NO: 3 disclosed in WO99/19467. The bacterial alpha-amylase may also have a substitution in a position corresponding to S239 in the Bacillus licheniformis alpha-amylase shown in SEQ ID NO: 4 in WO99/19467, or a S242 and/or E188P variant of the Bacillus stearothermophilus alpha-amylase of SEQ ID NO: 3 in WO99/19467.

[0252] In one embodiment, the variant is a S242A, E or Q variant, e.g., a S242Q variant, of the Bacillus stearothermophilus alpha-amylase.

[0253] In one embodiment, the variant is a position E188 variant, e.g., E188P variant of the Bacillus stearothermophilus alpha-amylase.

[0254] The bacterial alpha-amylase may, in one embodiment, be a truncated Bacillus alpha-amylase. In one embodiment, the truncation is so that, e.g., the Bacillus stearothermophilus alpha-amylase shown in SEQ ID NO: 3 in WO99/19467, is about 491 amino acids long, such as from 480 to 495 amino acids long, or so it lacks a functional starch bind domain.

[0255] The bacterial alpha-amylase may also be a hybrid bacterial alpha-amylase, e.g., an alpha-amylase comprising 445 C-terminal amino acid residues of the Bacillus licheniformis alpha-amylase (shown in SEQ ID NO: 4 of WO99/19467) and the 37 N-terminal amino acid residues of the alpha-amylase derived from Bacillus amyloliquefaciens (shown in SEQ ID NO: 5 of WO99/19467). In one embodiment, this hybrid has one or more, especially all, of the following substitutions: G48A+T491+G107A+H156Y+A181T+N190F+1201F+A209V+Q264S (using the Bacillus licheniformis numbering in SEQ ID NO: 4 of WO99/19467). In some embodiments, the variants have one or more of the following mutations (or corresponding mutations in other Bacillus alpha-amylases): H154Y, A181T, N190F, A209V and Q264S and/or the deletion of two residues between positions 176 and 179, e.g., deletion of E178 and G179 (using SEQ ID NO: 5 of WO99/19467 for position numbering).

[0256] In one embodiment, the bacterial alpha-amylase is the mature part of the chimeric alpha-amylase disclosed in Richardson et al. (2002), The Journal of Biological Chemistry, Vol. 277, No 29, Issue 19 July, pp. 267501-26507, referred to as BD5088 or a variant thereof. This alpha-amylase is the same as the one shown in SEQ ID NO: 2 in WO2007/134207. The mature enzyme sequence starts after the initial “Met” amino acid in position 1.

[0257] The alpha-amylase may be a thermostable alpha-amylase, such as a thermostable bacterial alpha-amylase, e.g., from Bacillus stearothermophilus. In one embodiment, the alpha-amylase used in a process described herein has a T1/2 (min) at pH 4.5, 85° C., 0.12 mM CaCl₂ of at least 10 determined as described in Example 1 of WO2018/098381.

[0258] In one embodiment, the thermostable alpha-amylase has a T1/2 (min) at pH 4.5, 85° C., 0.12 mM CaCl₂, of at least 15. In one embodiment, the thermostable alpha-amylase has a T1/2% (min) at pH 4.5, 85° C., 0.12 mM CaCl₂, of as at least 20. In one embodiment, the thermostable alpha-amylase has a T1/2 (min) at pH 4.5, 85° C., 0.12 mM CaCl₂, of as at least 25. In one embodiment, the thermostable alpha-amylase has a T1/2 (min) at pH 4.5, 85° C., 0.12 mM CaCl₂, of as at least 30. In one embodiment, the thermostable alpha-amylase has a T1/2 (min) at pH 4.5, 85° C., 0.12 mM CaCl₂, of as at least 40.

[0259] In one embodiment, the thermostable alpha-amylase has a T1/2 (min) at pH 4.5, 85° C., 0.12 mM CaCl₂, of at least 50. In one embodiment, the thermostable alpha-amylase has a T1/2% (min) at pH 4.5, 85° C., 0.12 mM CaCl₂, of at least 60. In one embodiment, the thermostable alpha-amylase has a T1/2 (min) at pH 4.5, 85° C., 0.12 mM CaCl₂, between 10-70. In one embodiment, the thermostable alpha-amylase has a T1/2 (min) at pH 4.5, 85° C., 0.12 mM CaCl₂, between 15-70. In one embodiment, the thermostable alpha-amylase has a T1/2 (min) at pH 4.5, 85° C., 0.12 mM CaCl₂, between 20-70. In one embodiment, the thermostable alpha-amylase has a T1/2 (min) at pH 4.5, 85° C., 0.12 mM CaCl₂, between 25-70. In one embodiment, the thermostable alpha-amylase has a T1/2 (min) at pH 4.5, 85° C., 0.12 mM CaCl₂, between 30-70. In one embodiment, the thermostable alpha-amylase has a T1/2 (min) at pH 4.5, 85° C., 0.12 mM CaCl₂, between 40-70. In one embodiment, the thermostable alpha-amylase has a T1/2% (min) at pH 4.5, 85° C., 0.12 mM CaCl₂, between 50-70. In one embodiment, the thermostable alpha-amylase has a T1/2 (min) at pH 4.5, 85° C., 0.12 mM CaCl₂, between 60-70.

[0260] In one embodiment, the alpha-amylase is a bacterial alpha-amylase, e.g., derived from the genus Bacillus, such as a strain of Bacillus stearothermophilus, e.g., the Bacillus stearothermophilus as disclosed in WO99/019467 as SEQ ID NO: 3 with one or two amino acids deleted at positions R179, G180, I181 and/or G182, in particular with R179 and G180 deleted, or with 1181 and G182 deleted, with mutations in below list of mutations.

[0261] In some embodiment, the Bacillus stearothermophilus alpha-amylases have double deletion 1181+G182, and optional substitution N193F, further comprising one of the following substitutions or combinations of substitutions:

[0262] V59A+Q89R+G112D+E129V+K177L+R179E+K220P+N224L+Q254S;

[0263] V59A+Q89R+E129V+K177L+R179E+H208Y+K220P+N224L+Q254S;

[0264] V59A+Q89R+E129V+K177L+R179E+K220P+N224L+Q254S+D269E+D281N;

[0265] V59A+Q89R+E129V+K177L+R179E+K220P+N224L+Q254S+1270L;

[0266] V59A+Q89R+E129V+K177L+R179E+K220P+N224L+Q254S+H274K;

[0267] V59A+Q89R+E129V+K177L+R179E+K220P+N224L+Q254S+Y276F;

[0268] V59A+E129V+R157Y+K177L+R179E+K220P+N224L+S242Q+Q254S;

[0269] V59A+E129V+K177L+R179E+H208Y+K220P+N224L+S242Q+Q254S;

[0270] V59A+E129V+K177L+R179E+K220P+N224L+S242Q+Q254S;

[0271] V59A+E129V+K177L+R179E+K220P+N224L+S242Q+Q254S+H274K;

[0272] V59A+E129V+K177L+R179E+K220P+N224L+S242Q+Q254S+Y276F;

[0273] V59A+E129V+K177L+R179E+K220P+N224L+S242Q+Q254S+D281N;

[0274] V59A+E129V+K177L+R179E+K220P+N224L+S242Q+Q254S+M284T;

[0275] V59A+E129V+K177L+R179E+K220P+N224L+S242Q+Q254S+G416V;

[0276] V59A+E129V+K177L+R179E+K220P+N224L+Q254S;

[0277] V59A+E129V+K177L+R179E+K220P+N224L+Q254S+M284T;

[0278] A91L+M961+E129V+K177L+R179E+K220P+N224L+S242Q+Q254S;

[0279] E129V+K177L+R179E;

[0280] E129V+K177L+R179E+K220P+N224L+S242Q+Q254S;

[0281] E129V+K177L+R179E+K220P+N224L+S242Q+Q254S+Y276F+L427M;

[0282] E129V+K177L+R179E+K220P+N224L+S242Q+Q254S+M284T;

[0283] E129V+K177L+R179E+K220P+N224L+S242Q+Q254S+N376*+1377*;

[0284] E129V+K177L+R179E+K220P+N224L+Q254S;

[0285] E129V+K177L+R179E+K220P+N224L+Q254S+M284T;

[0286] E129V+K177L+R179E+S242Q;

[0287] E129V+K177L+R179V+K220P+N224L+S242Q+Q254S;

[0288] K220P+N224L+S242Q+Q254S;

[0289] M284V;

[0290] V59A+Q89R+E129V+K177L+R179E+Q254S+M284V; and

[0291] V59A+E129V+K177L+R179E+Q254S+M284V;

[0292] In one embodiment, the alpha-amylase is selected from the group of Bacillus stearothermophilus alpha-amylase variants with double deletion 1181*+G182*, and optionally substitution N193F, and further one of the following substitutions or combinations of substitutions:

[0293] E129V+K177L+R179E;

[0294] V59A+Q89R+E129V+K177L+R179E+H208Y+K220P+N224L+Q254S;

[0295] V59A+Q89R+E129V+K177L+R179E+Q254S+M284V;

[0296] V59A+E129V+K177L+R179E+Q254S+M284V; and

[0297] E129V+K177L+R179E+K220P+N224L+S242Q+Q254S (using SEQ ID NO: 1 herein for numbering).

[0298] It should be understood that when referring to Bacillus stearothermophilus alpha-amylase and variants thereof they are normally produced in truncated form. In particular, the truncation may be so that the Bacillus stearothermophilus alpha-amylase shown in SEQ ID NO: 3 in WO99/19467, or variants thereof, are truncated in the C-terminal and are typically from 480-495 amino acids long, such as about 491 amino acids long, e.g., so that it lacks a functional starch binding domain.

[0299] In one embodiment, the alpha-amylase variant may be an enzyme having a degree of identity of at least 60%, e.g., at least 70%, at least 80%, at least 90%, at least 95%, at least 91%, at least 92%, at least 93%, at least 94%, at least 95%, at least 96%, at least 97%, at least 98% or at least 99%, but less than 100% to the sequence shown in SEQ ID NO: 3 in WO99/19467.

[0300] In one embodiment, the bacterial alpha-amylase, e.g., Bacillus alpha-amylase, such as especially Bacillus stearothermophilus alpha-amylase, or variant thereof, is dosed to liquefaction in a concentration between 0.01-10 KNU-A/g DS, e.g., between 0.02 and 5 KNU-A/g DS, such as 0.03 and 3 KNU-A, preferably 0.04 and 2 KNU-A/g DS, such as especially 0.01 and 2 KNU-A/g DS. In one embodiment, the bacterial alpha-amylase, e.g., Bacillus alpha-amylase, such as especially Bacillus stearothermophilus alpha-amylases, or variant thereof, is dosed to liquefaction in a concentration of between 0.0001-1 mg EP (Enzyme Protein)/g DS, e.g., 0.0005-0.5 mg EP/g DS, such as 0.001-0.1 mg EP/g DS.

[0301] In one embodiment, the bacterial alpha-amylase is derived from a Bacillus subtilis alpha-amylase (SEQ ID NOs: 76, 83 or 84 of WO2018/222990), a Bacillus subtilis alpha-amylase (SEQ ID NO: 82 of WO2018/222990), a Bacillus licheniformis alpha-amylase (SEQ ID NO: 85 of WO2018/222990), a Clostridium phytofermentans alpha-amylase (SEQ ID NOs: 89-94 of WO2018/222990), a Clostridium thermocellum alpha-amylase (SEQ ID NO: 95 of WO2018/222990), a Thermobifida fusca alpha-amylase (SEQ ID NOs: 96 or 97 of WO2018/222990), a Thermobifida fusca alpha-amylase (SEQ ID NO: 97 or of WO2018/222990), a Anaerocellum thermophilum (SEQ ID NOs: 98, 99, or 100 of WO2018/222990), or a Streptomyces avermitilis alpha amylase (SEQ ID NO: 88 or 101 of WO2018/222990).

[0302] In one embodiment, the alpha-amylase is derived from a yeast alpha-amylase, such as the Saccharomycopsis fibuligera alpha-amylase (SEQ ID NO: 77 of WO2018/222990), a Debaryomyces occidentalis alpha-amylase (SEQ ID NOs: 78 or 79 of WO2018/222990), or a Lipomyces kononenkoae alpha-amylase (SEQ ID NO: 80 or 81 of WO2018/222990).

[0303] In one embodiment, the alpha-amylase is derived from a filamentous fungal alpha-amylase, such as an Aspergillus niger alpha-amylase (SEQ ID NO: 86 or 87 of WO2018/222990).

[0304] Additional alpha-amylases contemplated for use with the present invention can be found in WO2011/153516, WO2017/087330 and WO2020/023411 (the contents of which are incorporated herein).

[0305] Additional polynucleotides encoding suitable alpha-amylases may be obtained from microorganisms of any genus, including those readily available within the UniProtKB database (www.uniprot.org).

[0306] The alpha-amylase coding sequences can also be used to design nucleic acid probes to identify and clone DNA encoding alpha-amylases from strains of different genera or species, as described supra.

[0307] The polynucleotides encoding alpha-amylases may also be identified and obtained from other sources including microorganisms isolated from nature (e.g., soil, composts, water, etc.) or DNA samples obtained directly from natural materials (e.g., soil, composts, water, etc,) as described supra.

[0308] Techniques used to isolate or clone polynucleotides encoding alpha-amylases are described supra.

[0309] In one embodiment, the alpha-amylase has at least 60%, e.g., at least 65%, at least 70%, at least 75%, at least 80%, at least 85%, at least 90%, at least 91%, at least 92%, at least 93%, at least 94%, at least 95%, at least 96%, at least 97%, at least 98%, at least 99%, or 100% sequence identity to any alpha-amylase described or referenced herein (e.g., the Debaryomyces occidentalis alpha-amylase shown as SEQ ID NO: 79 of WO2018/222990). In one aspect, the alpha-amylase sequence differs by no more than ten amino acids, e.g., by no more than five amino acids, by no more than four amino acids, by no more than three amino acids, by no more than two amino acids, or by one amino acid from any alpha-amylase described or referenced herein (e.g., the Debaryomyces occidentalis alpha-amylase shown as SEQ ID NO: 79 of WO2018/222990). In one embodiment, the alpha-amylase comprises or consists of the amino acid sequence of any alpha-amylase described or referenced herein (e.g., the Debaryomyces occidentalis alpha-amylase shown as SEQ ID NO: 79 of WO2018/222990), allelic variant, or a fragment thereof having alpha-amylase activity. In one embodiment, the alpha-amylase has an amino acid substitution, deletion, and/or insertion of one or more (e.g., two, several) amino acids. In some embodiments, the total number of amino acid substitutions, deletions and/or insertions is not more than 10, e.g., not more than 9, 8, 7, 6, 5, 4, 3, 2, or 1.

[0310] In some embodiments, the alpha-amylase has at least 20%, e.g., at least 40%, at least 50%, at least 60%, at least 70%, at least 80%, at least 90%, at least 95%, at least 96%, at least 97%, at least 98%, at least 99%, or 100% of the alpha-amylase activity of any alpha-amylase described or referenced herein (e.g., the Debaryomyces occidentalis alpha-amylase shown as SEQ ID NO: 79 of WO2018/222990) under the same conditions.

[0311] In one embodiment, the alpha-amylase coding sequence hybridizes under at least low stringency conditions, e.g., medium stringency conditions, medium-high stringency conditions, high stringency conditions, or very high stringency conditions with the full-length complementary strand of the coding sequence from any alpha-amylase described or referenced herein (e.g., the Debaryomyces occidentalis alpha-amylase shown as SEQ ID NO: 79 of WO2018/222990). In one embodiment, the alpha-amylase coding sequence has at least 65%, e.g., at least 70%, at least 75%, at least 80%, at least 85%, at least 85%, at least 90%, at least 91%, at least 92%, at least 93%, at least 94%, at least 95%, at least 96%, at least 97%, at least 98%, at least 99%, or 100% sequence identity with the coding sequence from any alpha-amylase described or referenced herein (e.g., the Debaryomyces occidentalis alpha-amylase shown as SEQ ID NO: 79 of WO2018/222990).

[0312] In one embodiment, the polynucleotide encoding the alpha-amylase comprises the coding sequence of any alpha-amylase described or referenced herein (e.g., the Debaryomyces occidentalis alpha-amylase shown as SEQ ID NO: 79 of WO2018/222990). In one embodiment, the polynucleotide encoding the alpha-amylase comprises a subsequence of the coding sequence from any alpha-amylase described or referenced herein, wherein the subsequence encodes a polypeptide having alpha-amylase activity. In one embodiment, the number of nucleotides residues in the subsequence is at least 75%, e.g., at least 80%, 85%, 90%, or 95% of the number of the referenced coding sequence.

[0313] The alpha-amylase can also include fused polypeptides or cleavable fusion polypeptides, as described supra.

### Proteases

[0314] In the processes described herein, a protease may optionally be present and/or added in slurry and/or liquefaction together with alpha-amylase, and an optional glucoamylase, phospholipase C, xylanase, endoglucanase, phytase, and/or pullulanase.

[0315] Proteases are classified on the basis of their catalytic mechanism into the following groups: Serine proteases (S), Cysteine proteases (C), Aspartic proteases (A), Metallo proteases (M), and Unknown, or as yet unclassified, proteases (U), see Handbook of Proteolytic Enzymes, A.J.Barrett, N.D.Rawlings, J.F.Woessner (eds), Academic Press (1998), in particular the general introduction part.

[0316] In some embodiments, the fermenting organism comprises a heterologous polynucleotide encoding a protease, for example, as described in WO2018/222990, the content of which is hereby incorporated by reference. Any protease described or referenced herein is contemplated for expression in the fermenting organism.

[0317] The protease may be any protease that is suitable for the host cells and/or the methods described herein, such as a naturally occurring protease or a variant thereof that retains protease activity.

[0318] In some embodiments, the fermenting organism comprising a heterologous polynucleotide encoding a protease has an increased level of protease activity compared to the host cells without the heterologous polynucleotide encoding the protease, when cultivated under the same conditions. In some embodiments, the fermenting organism has an increased level of protease activity of at least 5%, e.g., at least 10%, at least 15%, at least 20%, at least 25%, at least 50%, at least 100%, at least 150%, at least 200%, at least 300%, or at 500% compared to the fermenting organism without the heterologous polynucleotide encoding the protease, when cultivated under the same conditions.

[0319] Exemplary proteases that can be used with the host cells and/or the methods described herein include bacterial, yeast, or filamentous fungal proteases, e.g., derived from any of the microorganisms described or referenced herein.

[0320] In one embodiment, the protease is a thermostable protease used according to a process described herein and is a “metallo protease” defined as a protease belonging to EC 3.4.24 (metalloendopeptidases); preferably EC 3.4.24.39 (acid metallo proteinases).

[0321] To determine whether a given protease is a metallo protease or not, reference is made to the above “Handbook of Proteolytic Enzymes” and the principles indicated therein. Such determination can be carried out for all types of proteases, be it naturally occurring or wild-type proteases; or genetically engineered or synthetic proteases.

[0322] Protease activity can be measured using any suitable assay, in which a substrate is employed, that includes peptide bonds relevant for the specificity of the protease in question. Assay-pH and assay-temperature are likewise to be adapted to the protease in question. Examples of assay-pH-values are pH 6, 7, 8, 9, 10, or 11. Examples of assay-temperatures are 30, 35, 37, 40, 45, 50, 55, 60, 65, 70 or 80° C.

[0323] Examples of protease substrates are casein, such as Azurine-Crosslinked Casein (AZCL-casein).

[0324] In one embodiment, the thermostable protease has at least 20%, such as at least 30%, such as at least 40%, such as at least 50%, such as at least 60%, such as at least 70%, such as at least 80%, such as at least 90%, such as at least 95%, such as at least 100% of the protease activity of the Protease 196 variant or Protease Pfu.

[0325] There are no limitations on the origin of a thermostable protease used in a process described herein as long as it fulfills the thermostability properties defined below.

[0326] In one embodiment the protease is of fungal origin.

[0327] The thermostable protease may be a variant of, e.g., a wild-type protease as long as the protease has the thermostability properties defined herein. In one embodiment, the thermostable protease is a variant of a metallo protease as defined above. In one embodiment, the thermostable protease used in a process described herein is of fungal origin, such as a fungal metallo protease, such as a fungal metallo protease derived from a strain of the genus Thermoascus, preferably a strain of Thermoascus aurantiacus, especially Thermoascus aurantiacus CGMCC No. 0670 (classified as EC 3.4.24.39).

[0328] In one embodiment, the thermostable protease is a variant of the mature part of the metallo protease shown in SEQ ID NO: 2 disclosed in WO2003/048353 or the mature part of SEQ ID NO: 1 in WO2010/008841 (SEQ ID NO: 292 herein) further with one of the following substitutions or combinations of substitutions:

[0329] S5*+D79L+S87P+A112P+D142L;

[0330] D79L+S87P+A112P+T124V+D142L;

[0331] S5*+N26R+D79L+S87P+A112P+D142L;

[0332] N26R+T46R+D79L+S87P+A112P+D142L;

[0333] T46R+D79L+S87P+T116V+D142L;

[0334] D79L+P81R+S87P+A112P+D142L;

[0335] A27K+D79L+S87P+A112P+T124V+D142L;

[0336] D79L+Y82F+S87P+A112P+T124V+D142L;

[0337] D79L+Y82F+S87P+A112P+T124V+D142L;

[0338] D79L+S87P+A112P+T124V+A126V+D142L;

[0339] D79L+S87P+A112P+D142L;

[0340] D79L+Y82F+S87P+A112P+D142L;

[0341] S38T+D79L+S87P+A112P+A126V+D142L;

[0342] D79L+Y82F+S87P+A112P+A126V+D142L;

[0343] A27K+D79L+S87P+A112P+A126V+D142L;

[0344] D79L+S87P+N98C+A112P+G135C+D142L;

[0345] D79L+S87P+A112P+D142L+T141C+M161C;

[0346] S36P+D79L+S87P+A112P+D142L;

[0347] A37P+D79L+S87P+A112P+D142L;

[0348] S49P+D79L+S87P+A112P+D142L;

[0349] S50P+D79L+S87P+A112P+D142L;

[0350] D79L+S87P+D104P+A112P+D142L;

[0351] D79L+Y82F+S87G+A112P+D142L;

[0352] S70V+D79L+Y82F+S87G+Y97W+A112P+D142L;

[0353] D79L+Y82F+S87G+Y97W+D104P+A112P+D142L;

[0354] S70V+D79L+Y82F+S87G+A112P+D142L;

[0355] D79L+Y82F+S87G+D104P+A112P+D142L;

[0356] D79L+Y82F+S87G+A112P+A126V+D142L;

[0357] Y82F+S87G+S70V+D79L+D104P+A112P+D142L;

[0358] Y82F+S87G+D79L+D104P+A112P+A126V+D142L;

[0359] A27K+D79L+Y82F+S87G+D104P+A112P+A126V+D142L;

[0360] A27K+Y82F+S87G+D104P+A112P+A126V+D142L;

[0361] A27K+D79L+Y82F+D104P+A112P+A126V+D142L;

[0362] A27K+Y82F+D104P+A112P+A126V+D142L;

[0363] A27K+D79L+S87P+A112P+D142L; and

[0364] D79L+S87P+D142L.

[0365] In one embodiment, the thermostable protease is a variant of the metallo protease disclosed as the mature part of SEQ ID NO: 2 disclosed in WO2003/048353 or the mature part of SEQ ID NO: 1 in WO2010/008841 (SEQ ID NO: 292 herein) with one of the following substitutions or combinations of substitutions:

[0366] D79L+S87P+A112P+D142L;

[0367] D79L+S87P+D142L; and

[0368] A27K+D79L+Y82F+S87G+D104P+A112P+A126V+D142L.

[0369] In one embodiment, the protease variant has at least 75% identity preferably at least 80%, more preferably at least 85%, more preferably at least 90%, more preferably at least 91%, more preferably at least 92%, even more preferably at least 93%, most preferably at least 94%, and even most preferably at least 95%, such as even at least 96%, at least 97%, at least 98%, at least 99%, but less than 100% identity to the mature part of the polypeptide of SEQ ID NO: 2 disclosed in WO2003/048353 or the mature part of SEQ ID NO: 1 in WO2010/008841 (SEQ ID NO: 292 herein).

[0370] The thermostable protease may also be derived from any bacterium as long as the protease has the thermostability properties.

[0371] In one embodiment, the thermostable protease is derived from a strain of the bacterium Pyrococcus, such as a strain of Pyrococcus furiosus (pfu protease), for example, the Pyrococcus furiosus protease of SEQ ID NO: 291 or a variant thereof having at least 80% identity, such as at least 85%, such as at least 90%, such as at least 95%, such as at least 96%, such as at least 97%, such as at least 98%, such as at least 99% identity thereto.

[0372] In one embodiment, the protease is one shown as SEQ ID NO: 1 of U.S. Pat. No. 6,358,726-E1 (Takara Shuzo Company).

[0373] In one embodiment, the thermostable protease is a protease having at least 80% identity, such as at least 85%, such as at least 90%, such as at least 95%, such as at least 96%, such as at least 97%, such as at least 98%, such as at least 99% identity to SEQ ID NO: 1 of U.S. Pat. No. 6,358,726-B1. The Pyroccus furiosus protease can be purchased from Takara Bio, Japan.

[0374] The Pyrococcus furiosus protease is a thermostable protease. The commercial product Pyrococcus furiosus protease (PfuS) was found to have a thermostability of 110% (80° C./70° C.) and 103% (90° C./70° C.) at pH 4.5.

[0375] In one embodiment, a thermostable protease used in a process described herein has a thermostability value of more than 20% determined as Relative Activity at 80° C./70° C.

[0376] In one embodiment, the protease has a thermostability of more than 30%, more than 40%, more than 50%, more than 60%, more than 70%, more than 80%, more than 90%, more than 100%, such as more than 105%, such as more than 110%, such as more than 115%, such as more than 120% determined as Relative Activity at 80° C./70° C.

[0377] In one embodiment, protease has a thermostability of between 20 and 50%, such as between 20 and 40%, such as 20 and 30% determined as Relative Activity at 80° C./70° C. In one embodiment, the protease has a thermostability between 50 and 115%, such as between 50 and 70%, such as between 50 and 60%, such as between 100 and 120%, such as between 105 and 115% determined as Relative Activity at 80° C./70° C.

[0378] In one embodiment, the protease has a thermostability value of more than 10% determined as Relative Activity at 85° C./70° C.

[0379] In one embodiment, the protease has a thermostability of more than 10%, such as more than 12%, more than 14%, more than 16%, more than 18%, more than 20%, more than 30%, more than 40%, more that 50%, more than 60%, more than 70%, more than 80%, more than 90%, more than 100%, more than 110% determined as Relative Activity at 85° C./70° C.

[0380] In one embodiment, the protease has a thermostability of between 10% and 50%, such as between 10% and 30%, such as between 10% and 25% determined as Relative Activity at 85° C./70° C.

[0381] In one embodiment, the protease has more than 20%, more than 30%, more than 40%, more than 50%, more than 60%, more than 70%, more than 80%, more than 90% determined as Remaining Activity at 80° C.; and/or the protease has more than 20%, more than 30%, more than 40%, more than 50%, more than 60%, more than 70%, more than 80%, more than 90% determined as Remaining Activity at 84° C.

[0382] Determination of “Relative Activity” and “Remaining Activity” is done as described in the art (e.g., WO2018/098381).

[0383] In one embodiment, the protease may have a themostability for above 90, such as above 100 at 85° C. as determined using a Zein-BCA assay.

[0384] In one embodiment, the protease has a themostability above 60%, such as above 90%, such as above 100%, such as above 110% at 85° C. as determined using a Zein-BCA assay.

[0385] In one embodiment, protease has a themostability between 60-120, such as between 70-120%, such as between 80-120%, such as between 90-120%, such as between 100-120%, such as 110-120% at 85° C. as determined using a Zein-BCA assay.

[0386] In one embodiment, the thermostable protease has at least 20%, such as at least 30%, such as at least 40%, such as at least 50%, such as at least 60%, such as at least 70%, such as at least 80%, such as at least 90%, such as at least 95%, such as at least 100% of the activity of the JTP196 protease variant or Protease Pfu determined by a AZCL-casein assay.

[0387] Additional proteases contemplated for use with the present invention can be found in WO2018/222990 (the content of which is incorporated herein).

[0388] Additional polynucleotides encoding suitable proteases may be obtained from microorganisms of any genus, including those readily available within the UniProtKB database (www.uniprot.org).

[0389] The protease coding sequences can also be used to design nucleic acid probes to identify and clone DNA encoding proteases from strains of different genera or species, as described supra.

[0390] The polynucleotides encoding proteases may also be identified and obtained from other sources including microorganisms isolated from nature (e.g., soil, composts, water, etc.) or DNA samples obtained directly from natural materials (e.g., soil, composts, water, etc,) as described supra.

[0391] Techniques used to isolate or clone polynucleotides encoding proteases are described supra.

[0392] The protease can also include fused polypeptides or cleavable fusion polypeptides, as described supra.

[0393] In one embodiment, the thermostable protease is a serine protease, e.g., an S8 protease, such as one disclosed in WO2019/070883, which is hereby incorporated herein by reference in its entirety.

[0394] In an embodiment, the S8 protease is derived from Palaeococcus, for instance Palaeococcus ferrophilus, such as the Palaeococcus ferrophilus S8 protease of SEQ ID NO: 2 in WO2019/070883, or a variant thereof having at least 60% identity, preferably at least 65% identity, preferably at least 70% identity, at least 75% identity preferably at least 80%, more preferably at least 85%, more preferably at least 90%, more preferably at least 91%, more preferably at least 92%, even more preferably at least 93%, most preferably at least 94%, and even most preferably at least 95%, such as even at least 96%, at least 97%, at least 98%, or at least 99%, but less than 100% identity to the amino acid sequence of SEQ ID NO: 2 in WO2019/070883.

[0395] In an embodiment, the S8 protease is derived from Thermococcus, for instance Thermococcus litoralis or Thermococcus thioreducens, such as the Thermococcus litoralis S8 protease of SEQ ID NO: 9 in WO2019/070883, or a variant thereof having at least 60% identity, preferably at least 65% identity, preferably at least 70% identity, at least 75% identity preferably at least 80%, more preferably at least 85%, more preferably at least 90%, more preferably at least 91%, more preferably at least 92%, even more preferably at least 93%, most preferably at least 94%, and even most preferably at least 95%, such as even at least 96%, at least 97%, at least 98%, or at least 99%, but less than 100% identity to the amino acid sequence of SEQ ID NO: 9 in WO2019/070883, or the Thermococcus thioreducens S8 protease of SEQ ID NO: 10 in WO2019/070883, or a variant thereof having at least 60% identity, preferably at least 65% identity, preferably at least 70% identity, at least 75% identity preferably at least 80%, more preferably at least 85%, more preferably at least 90%, more preferably at least 91%, more preferably at least 92%, even more preferably at least 93%, most preferably at least 94%, and even most preferably at least 95%, such as even at least 96%, at least 97%, at least 98%, or at least 99%, but less than 100% identity to the amino acid sequence of SEQ ID NO: 10 in WO2019/070883.

### Glucoamylase in Liquefaction

[0396] A glucoamylase may optionally be present and/or added in liquefaction step and/or the slurry prior to optional jet cook and/or liquefaction. In one embodiment, the glucoamylase is added together with or separately from the alpha-amylase and/or the optional protease, endoglucanase, phospholipase C, xylanase, phytase, and/or pullulanase.

[0397] In some embodiments, the fermenting organism comprises a heterologous polynucleotide encoding a glucoamylase, for example, as described in WO2017/087330, the content of which is hereby incorporated by reference. Any glucoamylase described or referenced herein is contemplated for expression in the fermenting organism.

[0398] The glucoamylase may be any glucoamylase that is suitable for the host cells and/or the methods described herein, such as a naturally occurring glucoamylase or a variant thereof that retains glucoamylase activity. The Glucoamylase in liquefaction may be any glucoamylase described in this section and/or any glucoamylase described in “Glucoamylase in Saccharification and/or Fermentation” described below.

[0399] In some embodiments, the fermenting organism comprising a heterologous polynucleotide encoding a glucoamylase has an increased level of glucoamylase activity compared to the host cells without the heterologous polynucleotide encoding the glucoamylase, when cultivated under the same conditions. In some embodiments, the fermenting organism has an increased level of glucoamylase activity of at least 5%, e.g., at least 10%, at least 15%, at least 20%, at least 25%, at least 50%, at least 100%, at least 150%, at least 200%, at least 300%, or at 500% compared to the fermenting organism without the heterologous polynucleotide encoding the glucoamylase, when cultivated under the same conditions.

[0400] Exemplary glucoamylases that can be used with the host cells and/or the methods described herein include bacterial, yeast, or filamentous fungal glucoamylases, e.g., obtained from any of the microorganisms described or referenced herein, as described supra.

[0401] In one embodiment, the glucoamylase has a Relative Activity heat stability at 85° C. of at least 20%, at least 30%, or at least 35% determined as described in Example 4 of WO2018/098381 (heat stability).

[0402] In one embodiment, the glucoamylase has a relative activity pH optimum at pH 5.0 of at least 90%, e.g., at least 95%, at least 97%, or 100% determined as described in Example 4 of WO2018/098381 (pH optimum).

[0403] In one embodiment, the glucoamylase has a pH stability at pH 5.0 of at least 80%, at least 85%, at least 90% determined as described in Example 4 of WO2018/098381 (pH stability).

[0404] In one embodiment, the glucoamylase, such as a Penicillium oxalicum glucoamylase variant, used in liquefaction has a thermostability determined as DSC Td at pH 4.0 as described in Example 15 of WO2018/098381 of at least 70° C., preferably at least 75° C., such as at least 80° C., such as at least 81° C., such as at least 82° C., such as at least 83° C., such as at least 84° C., such as at least 85° C., such as at least 86° C., such as at least 87%, such as at least 88° C., such as at least 89° C., such as at least 90° C. In one embodiment, the glucoamylase, such as a Penicillium oxalicum glucoamylase variant has a thermostability determined as DSC Td at pH 4.0 as described in Example 15 of WO2018/098381 in the range between 70° C. and 95° C., such as between 80° C. and 90° C.

[0405] In one embodiment, the glucoamylase, such as a Penicillium oxalicum glucoamylase variant, used in liquefaction has a thermostability determined as DSC Td at pH 4.8 as described in Example 15 of WO2018/098381 of at least 70° C., preferably at least 75° C., such as at least 80° C., such as at least 81° C., such as at least 82° C., such as at least 83° C., such as at least 84° C., such as at least 85° C., such as at least 86° C., such as at least 87%, such as at least 88° C., such as at least 89° C., such as at least 90° C., such as at least 91° C. In one embodiment, the glucoamylase, such as a Penicillium oxalicum glucoamylase variant has a thermostability determined as DSC Td at pH 4.8 as described in Example 15 of WO2018/098381 in the range between 70° C. and 95° C., such as between 80° C. and 90° C.

[0406] In one embodiment, the glucoamylase, such as a Penicillium oxalicum glucoamylase variant, used in liquefaction has a residual activity determined as described in Example 16 of WO2018/098381, of at least 100% such as at least 105%, such as at least 110%, such as at least 115%, such as at least 120%, such as at least 125%. In one embodiment, the glucoamylase, such as a Penicillium oxalicum glucoamylase variant has a thermostability determined as residual activity as described in Example 16 of WO2018/098381, in the range between 100% and 130%.

[0407] In one embodiment, the glucoamylase, e.g., of fungal origin such as a filamentous fungi, from a strain of the genus Penicillium, e.g., a strain of Penicillium oxalicum, in particular the Penicillium oxalicum glucoamylase disclosed as SEQ ID NO: 2 in WO2011/127802 (which is hereby incorporated by reference) and shown in SEQ ID NO: 9 or 14 herein.

[0408] In one embodiment, the glucoamylase has at least 80%, e.g., at least 85%, at least 90%, at least 91%, at least 92%, at least 93%, at least 94%, at least 95%, at least 96%, at least 97%, at least 98%, at least 99% or 100% identity to the mature polypeptide shown in SEQ ID NO: 2 in WO2011/127802.

[0409] In one embodiment, the glucoamylase is a variant of the Penicillium oxalicum glucoamylase disclosed as SEQ ID NO: 2 in WO2011/127802 and shown in SEQ ID NO: 9 and 14 herein, having a K79V substitution (using the mature sequence shown in SEQ ID NO: 14 herein for numbering). The K79V glucoamylase variant has reduced sensitivity to protease degradation relative to the parent as disclosed in WO2013/036526 (which is hereby incorporated by reference).

[0410] In one embodiment, the glucoamylase is derived from Penicillium oxalicum.

[0411] In one embodiment, the glucoamylase is a variant of the Penicillium oxalicum glucoamylase disclosed as SEQ ID NO: 2 in WO2011/127802. In one embodiment, the Penicillium oxalicum glucoamylase is the one disclosed as SEQ ID NO: 2 in WO2011/127802 having Val (V) in position 79.

[0412] Contemplated Penicillium oxalicum glucoamylase variants are disclosed in WO2013/053801 which is hereby incorporated by reference.

[0413] In one embodiment, these variants have reduced sensitivity to protease degradation.

[0414] In one embodiment, these variants have improved thermostability compared to the parent.

[0415] In one embodiment, the glucoamylase has a K79V substitution (using SEQ ID NO: 2 of WO2011/127802 for numbering), corresponding to the PE001 variant, and further comprises one of the following alterations or combinations of alterations

[0416] T65A; Q327F; E501V; Y504T; Y504*; T65A+Q327F; T65A+E501V; T65A+Y504T; T65A+Y504*; Q327F+E501V; Q327F+Y504T; Q327F+Y504*; E501V+Y504T; E501V+Y504*; T65A+Q327F+E501V; T65A+Q327F+Y504T; T65A+E501V+Y504T; Q327F+E501V+Y504T; T65A+Q327F+Y504*; T65A+E501V+Y504*; Q327F+E501V+Y504*; T65A+Q327F+E501V+Y504T; T65A+Q327F+E501V+Y504*; E501V+Y504T; T65A+K161S; T65A+Q405T; T65A+Q327W; T65A+Q327F; T65A+Q327Y; P11F+T65A+Q327F; R1K+D3W+K5Q+G7V+N8S+T10K+P11S+T65A+Q327F; P2N+P4S+P11F+T65A+Q327F; P11F+D26C+K33C+T65A+Q327F; P2N+P4S+P11F+T65A+Q327W+E501V+Y504T; R1E+D3N+P4G+G6R+G7A+N8A+T10D+P11D+T65A+Q327F; P11F+T65A+Q327W; P2N+P4S+P11F+T65A+Q327F+E501V+Y504T; P11F+T65A+Q327W+E501V+Y504T; T65A+Q327F+E501V+Y504T; T65A+S105P+Q327W; T65A+S105P+Q327F; T65A+Q327W+S364P; T65A+Q327F+S364P; T65A+S103N+Q327F; P2N+P4S+P11F+K34Y+T65A+Q327F; P2N+P4S+P11F+T65A+Q327F+D445N+V447S; P2N+P4S+P11F+T65A+1172V+Q327F; P2N+P4S+P11F+T65A+Q327F+N502*; P2N+P4S+P11F+T65A+Q327F+N502T+P563S+K571E; P2N+P4S+P11F+R31S+K33V+T65A+Q327F+N564D+K571S; P2N+P4S+P11F+T65A+Q327F+S377T; P2N+P4S+P11F+T65A+V325T+Q327W; P2N+P4S+P11F+T65A+Q327F+D445N+V447S+E501V+Y504T; P2N+P4S+P11F+T65A+1172V+Q327F+E501V+Y504T; P2N+P4S+P11F+T65A+Q327F+S377T+E501V+Y504T; P2N+P4S+P11F+D26N+K34Y+T65A+Q327F; P2N+P4S+P11F+T65A+Q327F+1375A+E501V+Y504T; P2N+P4S+P11F+T65A+K218A+K221D+Q327F+E501V+Y504T; P2N+P4S+P11F+T65A+S103N+Q327F+E501V+Y504T; P2N+P4S+T10D+T65A+Q327F+E501V+Y504T; P2N+P4S+F12Y+T65A+Q327F+E501V+Y504T; K5A+P11 F+T65A+Q327F+E501V+Y504T; P2N+P4S+T10E+E18N+T65A+Q327F+E501V+Y504T; P2N+T10E+E18N+T65A+Q327F+E501V+Y504T; P2N+P4S+P11F+T65A+Q327F+E501V+Y504T+T568N; P2N+P4S+P11F+T65A+Q327F+E501V+Y504T+K524T+G526A; P2N+P4S+P11F+K34Y+T65A+Q327F+D445N+V447S+E501V+Y504T; P2N+P4S+P11F+R31S+K33V+T65A+Q327F+D445N+V447S+E501V+Y504T; P2N+P4S+P11F+D26N+K34Y+T65A+Q327F+E501V+Y504T; P2N+P4S+P11 F+T65A+F80*+Q327F+E501V+Y504T; P2N+P4S+P11 F+T65A+K112S+Q327F+E501V+Y504T; P2N+P4S+P11F+T65A+Q327F+E501V+Y504T+T516P+K524T+G526A; P2N+P4S+P11F+T65A+Q327F+E501V+N502T+Y504*; P2N+P4S+P11F+T65A+Q327F+E501V+Y504T; P2N+P4S+P11F+T65A+S103N+Q327F+E501V+Y504T; K5A+P11F+T65A+Q327F+E501V+Y504T; P2N+P4S+P11F+T65A+Q327F+E501V+Y504T+T516P+K524T+G526A; P2N+P4S+P11F+T65A+V79A+Q327F+E501V+Y504T; P2N+P4S+P11F+T65A+V79G+Q327F+E501V+Y504T; P2N+P4S+P11F+T65A+V791+Q327F+E501V+Y504T; P2N+P4S+P11F+T65A+V79L+Q327F+E501V+Y504T; P2N+P4S+P11F+T65A+V79S+Q327F+E501V+Y504T; P2N+P4S+P11 F+T65A+L72V+Q327F+E501V+Y504T; S255N+Q327F+E501V+Y504T; P2N+P4S+P11F+T65A+E74N+V79K+Q327F+E501V+Y504T; P2N+P4S+P11F+T65A+G220N+Q327F+E501V+Y504T; P2N+P4S+P11F+T65A+Y245N+Q327F+E501V+Y504T; P2N+P4S+P11 F+T65A+Q253N+Q327F+E501V+Y504T; P2N+P4S+P11 F+T65A+D279N+Q327F+E501V+Y504T; P2N+P4S+P11F+T65A+Q327F+S359N+E501V+Y504T; P2N+P4S+P11F+T65A+Q327F+D370N+E501V+Y504T; P2N+P4S+P11F+T65A+Q327F+V460S+E501V+Y504T; P2N+P4S+P11F+T65A+Q327F+V460T+P468T+E501V+Y504T; P2N+P4S+P11F+T65A+Q327F+T463N+E501V+Y504T; P2N+P4S+P11F+T65A+Q327F+S465N+E501V+Y504T; and P2N+P4S+P11F+T65A+Q327F+T477N+E501V+Y504T.

[0417] In one embodiment, the Penicillium oxalicum glucoamylase variant has a K79V substitution (using SEQ ID NO: 2 of WO2011/127802 for numbering), corresponding to the PE001 variant, and further comprises one of the following substitutions or combinations of substitutions:

[0418] P11F+T65A+Q327F;

[0419] P2N+P4S+P11F+T65A+Q327F;

[0420] P11F+D26C+K33C+T65A+Q327F;

[0421] P2N+P4S+P11F+T65A+Q327W+E501V+Y504T;

[0422] P2N+P4S+P11F+T65A+Q327F+E501V+Y504T; and

[0423] P11F+T65A+Q327W+E501V+Y504T.

[0424] The glucoamylase may be added in amounts from 0.1-100 micrograms EP/g, such as 0.5-50 micrograms EP/g, such as 1-25 micrograms EP/g, such as 2-12 micrograms EP/g DS.

[0425] Additional polynucleotides encoding suitable glucoamylases may be obtained from microorganisms of any genus, including those readily available within the UniProtKB database (www.uniprot.org).

[0426] The glucoamylase coding sequences can also be used to design nucleic acid probes to identify and clone DNA encoding glucoamylases from strains of different genera or species, as described supra.

[0427] The polynucleotides encoding glucoamylases may also be identified and obtained from other sources including microorganisms isolated from nature (e.g., soil, composts, water, etc.) or DNA samples obtained directly from natural materials (e.g., soil, composts, water, etc,) as described supra.

[0428] Techniques used to isolate or clone polynucleotides encoding glucoamylases are described supra.

[0429] In one embodiment, the glucoamylase has at least 60%, e.g., at least 65%, at least 70%, at least 75%, at least 80%, at least 85%, at least 90%, at least 91%, at least 92%, at least 93%, at least 94%, at least 95%, at least 96%, at least 97%, at least 98%, at least 99%, or 100% sequence identity to any glucoamylase described or referenced herein. In one aspect, the glucoamylase sequence differs by no more than ten amino acids, e.g., by no more than five amino acids, by no more than four amino acids, by no more than three amino acids, by no more than two amino acids, or by one amino acid from any glucoamylase described or referenced herein. In one embodiment, the glucoamylase comprises or consists of the amino acid sequence of any glucoamylase described or referenced herein, allelic variant, or a fragment thereof having glucoamylase activity. In one embodiment, the glucoamylase has an amino acid substitution, deletion, and/or insertion of one or more (e.g., two, several) amino acids. In some embodiments, the total number of amino acid substitutions, deletions and/or insertions is not more than 10, e.g., not more than 9, 8, 7, 6, 5, 4, 3, 2, or 1.

[0430] In some embodiments, the glucoamylase has at least 20%, e.g., at least 40%, at least 50%, at least 60%, at least 70%, at least 80%, at least 90%, at least 95%, at least 96%, at least 97%, at least 98%, at least 99%, or 100% of the glucoamylase activity of any glucoamylase described or referenced herein under the same conditions.

[0431] In one embodiment, the glucoamylase coding sequence hybridizes under at least low stringency conditions, e.g., medium stringency conditions, medium-high stringency conditions, high stringency conditions, or very high stringency conditions with the full-length complementary strand of the coding sequence from any glucoamylase described or referenced herein. In one embodiment, the glucoamylase coding sequence has at least 65%, e.g., at least 70%, at least 75%, at least 80%, at least 85%, at least 85%, at least 90%, at least 91%, at least 92%, at least 93%, at least 94%, at least 95%, at least 96%, at least 97%, at least 98%, at least 99%, or 100% sequence identity with the coding sequence from any glucoamylase described or referenced herein.

[0432] In one embodiment, the polynucleotide encoding the glucoamylase comprises the coding sequence of any glucoamylase described or referenced herein. In one embodiment, the polynucleotide encoding the glucoamylase comprises a subsequence of the coding sequence from any glucoamylase described or referenced herein, wherein the subsequence encodes a polypeptide having glucoamylase activity. In one embodiment, the number of nucleotides residues in the subsequence is at least 75%, e.g., at least 80%, 85%, 90%, or 95% of the number of the referenced coding sequence.

[0433] The glucoamylase can also include fused polypeptides or cleavable fusion polypeptides, as described supra.

### Pullulanases

[0434] In some embodiments, a pullulanase is present and/or added added in the slurry prior to optional jet cook and/or liquefaction, in the liquefaction step and/or saccharification step, or simultaneous saccharification and fermentation (SSF).

[0435] Pullulanases (E.C. 3.2.1.41, pullulan 6-glucano-hydrolase), are debranching enzymes characterized by their ability to hydrolyze the alpha-1,6-glycosidic bonds in, for example, amylopectin and pullulan.

[0436] In some embodiments, the fermenting organism comprises a heterologous polynucleotide encoding a pullulanase. Any pullulanase described or referenced herein is contemplated for expression in the fermenting organism.

[0437] The pullulanase may be any pullulanase that is suitable for the host cells and/or the methods described herein, such as a naturally occurring pullulanase or a variant thereof that retains pullulanase activity.

[0438] In some embodiments, the fermenting organism comprising a heterologous polynucleotide encoding a pullulanase has an increased level of pullulanase activity compared to the host cells without the heterologous polynucleotide encoding the pullulanase, when cultivated under the same conditions. In some embodiments, the fermenting organism has an increased level of pullulanase activity of at least 5%, e.g., at least 10%, at least 15%, at least 20%, at least 25%, at least 50%, at least 100%, at least 150%, at least 200%, at least 300%, or at 500% compared to the fermenting organism without the heterologous polynucleotide encoding the pullulanase, when cultivated under the same conditions.

[0439] Exemplary pullulanasees that can be used with the host cells and/or the methods described herein include bacterial, yeast, or filamentous fungal pullulanases, e.g., obtained from any of the microorganisms described or referenced herein, as described supra.

[0440] Contemplated pullulanases include the pullulanases from Bacillus amyloderamificans disclosed in U.S. Pat. No. 4,560,651 (hereby incorporated by reference), the pullulanase disclosed as SEQ ID NO: 2 in WOO1/151620 (hereby incorporated by reference), the Bacillus deramificans disclosed as SEQ ID NO: 4 in WOO1/151620 (hereby incorporated by reference), and the pullulanase from Bacillus acidopullulyticus disclosed as SEQ ID NO: 6 in WOO1/151620 (hereby incorporated by reference) and also described in FEMS Mic. Let. (1994) 115, 97-106.

[0441] Additional pullulanases contemplated include the pullulanases from Pyrococcus woesei, specifically from Pyrococcus woesei DSM No. 3773 disclosed in WO92/02614.

[0442] In one embodiment, the pullulanase is a family GH57 pullulanase. In one embodiment, the pullulanase includes an X47 domain as disclosed in U.S. 61/289,040 published as WO2011/087836 (which are hereby incorporated by reference). More specifically the pullulanase may be derived from a strain of the genus Thermococcus, including Thermococcus litoralis and Thermococcus hydrothermalis, such as the Thermococcus hydrothermalis pullulanase truncated at site X4 right after the X47 domain (i.e., amino acids 1-782). The pullulanase may also be a hybrid of the Thermococcus litoralis and Thermococcus hydrothermalis pullulanases or a T. hydrothermalis/T. litoralis hybrid enzyme with truncation site X4 disclosed in U.S. 61/289,040 published as WO2011/087836 (which is hereby incorporated by reference).

[0443] In another embodiment, the pullulanase is one comprising an X46 domain disclosed in WO2011/076123 (Novozymes).

[0444] The pullulanase may be added in an effective amount which include the preferred amount of about 0.0001-10 mg enzyme protein per gram DS, preferably 0.0001-0.10 mg enzyme protein per gram DS, more preferably 0.0001-0.010 mg enzyme protein per gram DS. Pullulanase activity may be determined as NPUN. An Assay for determination of NPUN is described in WO2018/098381.

[0445] Suitable commercially available pullulanase products include PROMOZYME D, PROMOZYME™ D2 (Novozymes A/S, Denmark), OPTIMAX L-300 (DuPont-Danisco, USA), and AMANO 8 (Amano, Japan).

[0446] Additional pullulanases contemplated for use with the present invention can be found in WO2011/153516 (the content of which is incorporated herein).

[0447] Additional polynucleotides encoding suitable pullulanases may be obtained from microorganisms of any genus, including those readily available within the UniProtKB database (www.uniprot.org).

[0448] The pullulanase coding sequences can also be used to design nucleic acid probes to identify and clone DNA encoding pullulanases from strains of different genera or species, as described supra.

[0449] The polynucleotides encoding pullulanases may also be identified and obtained from other sources including microorganisms isolated from nature (e.g., soil, composts, water, etc.) or DNA samples obtained directly from natural materials (e.g., soil, composts, water, etc,) as described supra.

[0450] Techniques used to isolate or clone polynucleotides encoding pullulanases are described supra.

[0451] In one embodiment, the pullulanase has at least 60%, e.g., at least 65%, at least 70%, at least 75%, at least 80%, at least 85%, at least 90%, at least 91%, at least 92%, at least 93%, at least 94%, at least 95%, at least 96%, at least 97%, at least 98%, at least 99%, or 100% sequence identity to any pullulanase described or referenced herein. In one aspect, the pullulanase sequence differs by no more than ten amino acids, e.g., by no more than five amino acids, by no more than four amino acids, by no more than three amino acids, by no more than two amino acids, or by one amino acid from any pullulanase described or referenced herein. In one embodiment, the pullulanase comprises or consists of the amino acid sequence of any pullulanase described or referenced herein, allelic variant, or a fragment thereof having pullulanase activity. In one embodiment, the pullulanase has an amino acid substitution, deletion, and/or insertion of one or more (e.g., two, several) amino acids. In some embodiments, the total number of amino acid substitutions, deletions and/or insertions is not more than 10, e.g., not more than 9, 8, 7, 6, 5, 4, 3, 2, or 1.

[0452] In some embodiments, the pullulanase has at least 20%, e.g., at least 40%, at least 50%, at least 60%, at least 70%, at least 80%, at least 90%, at least 95%, at least 96%, at least 97%, at least 98%, at least 99%, or 100% of the pullulanase activity of any pullulanase described or referenced herein under the same conditions.

[0453] In one embodiment, the pullulanase coding sequence hybridizes under at least low stringency conditions, e.g., medium stringency conditions, medium-high stringency conditions, high stringency conditions, or very high stringency conditions with the full-length complementary strand of the coding sequence from any pullulanase described or referenced herein. In one embodiment, the pullulanase coding sequence has at least 65%, e.g., at least 70%, at least 75%, at least 80%, at least 85%, at least 85%, at least 90%, at least 91%, at least 92%, at least 93%, at least 94%, at least 95%, at least 96%, at least 97%, at least 98%, at least 99%, or 100% sequence identity with the coding sequence from any pullulanase described or referenced herein.

[0454] In one embodiment, the polynucleotide encoding the pullulanase comprises the coding sequence of any pullulanase described or referenced herein. In one embodiment, the polynucleotide encoding the pullulanase comprises a subsequence of the coding sequence from any pullulanase described or referenced herein, wherein the subsequence encodes a polypeptide having pullulanase activity. In one embodiment, the number of nucleotides residues in the subsequence is at least 75%, e.g., at least 80%, 85%, 90%, or 95% of the number of the referenced coding sequence.

[0455] The pullulanase can also include fused polypeptides or cleavable fusion polypeptides, as described supra.

### Saccharification and Fermentation of Starch-Containing Material

[0456] In aspects using a starch-containing material, a glucoamylase may be present and/or added in saccharification step a) and/or fermentation step b) or simultaneous saccharification and fermentation (SSF). The glucoamylase of the saccharification step a) and/or fermentation step b) or simultaneous saccharification and fermentation (SSF) is typically different from the glucoamylase optionally added to any liquefaction step described supra. In one embodiment, the glucoamylase is present and/or added together with a fungal alpha-amylase.

[0457] In some aspects, the fermenting organism comprises a heterologous polynucleotide encoding a glucoamylase, for example, as described in WO2017/087330, the content of which is hereby incorporated by reference.

[0458] Examples of glucoamylases can be found in the “Glucoamylases in Saccharification and/or Fermentation” section below.

[0459] When doing sequential saccharification and fermentation, saccharification step a) may be carried out under conditions well-known in the art. For instance, saccharification step a) may last up to from about 24 to about 72 hours. In one embodiment, pre-saccharification is done. Pre-saccharification is typically done for 40-90 minutes at a temperature between 30-65° C., typically about 60° C. Pre-saccharification is, in one embodiment, followed by saccharification during fermentation in simultaneous saccharification and fermentation (SSF). Saccharification is typically carried out at temperatures from 20-75° C., preferably from 40-70° C., typically about 60° C., and typically at a pH between 4 and 5, such as about pH 4.5.

[0460] Fermentation is carried out in a fermentation medium, as known in the art and, e.g., as described herein. The fermentation medium includes the fermentation substrate, that is, the carbohydrate source that is metabolized by the fermenting organism. With the processes described herein, the fermentation medium may comprise nutrients and growth stimulator(s) for the fermenting organism(s). Nutrient and growth stimulators are widely used in the art of fermentation and include nitrogen sources, such as ammonia; urea, vitamins and minerals, or combinations thereof.

[0461] In some embodiments, the fermenting organism provides (or is capable of providing) an ethanol yield increase over Saccharomyces cerevisiae strain Ethanol Red® (ER; deposited under Accession No. V14/007039 at National Measurement Institute, Victoria, Australia) of more than 1.0%, e.g., more than 2.0%, more than 2.5%, more than 3.0%, more than 3.5%, more than 4.0%, more than 4.5%, more than 5.0%, more than 5.5%, more than 6.0%, more than 6.5%, more than 7.0%, more than 7.5%, more than 8.0%, more than 8.5%, more than 9.0%, more than 9.5%, or more than 10.0%, using the same process set-up and conditions, e.g., conditions described herein. Improved ethanol yields can be measures at about or after 10, 20, 30, 40 50, 60 or 70 hours fermentation.

[0462] In some embodiments, the fermenting organism provides (or is capable of providing) an ethanol yield increase of more than 1.0%, e.g., more than 2.0%, more than 2.5%, more than 3.0%, more than 3.5%, more than 4.0%, more than 4.5%, more than 5.0%, more than 5.5%, more than 6.0%, more than 6.5%, more than 7.0%, more than 7.5%, more than 8.0%, more than 8.5%, more than 9.0%, more than 9.5%, or more than 10.0%, when compared to an otherwise identical fermenting organism lacking the genetic modification that increases or decreases expression of a regulator, when using the same process set-up and conditions, e.g., conditions described herein. Improved ethanol yields can be measures at about or after 10, 20, 30, 40 50, 60 or 70 hours fermentation.

[0463] Generally, fermenting organisms such as yeast, including Saccharomyces cerevisiae yeast, require an adequate source of nitrogen for propagation and fermentation. Many sources of supplemental nitrogen, if necessary, can be used and such sources of nitrogen are well known in the art. The nitrogen source may be organic, such as urea, DDGs, wet cake or corn mash, or inorganic, such as ammonia or ammonium hydroxide. In one embodiment, the nitrogen source is urea.

[0464] In some embodiments, the fermenting organism requires less supplemental nitrogen (e.g., urea, ammonia, ammonium hydroxide) during fermentation to maintain the same or greater yield of fermentation product (e.g., ethanol), when compared to an otherwise identical fermenting organism lacking the genetic modification that increases or decreases expression of a transporter, or regulator thereof. In some embodiments, the fermenting organism requires less than 95%, less than 90%, less than 85%, less than 80%, less than 75%, less than 70%, less than 65%, less than 60%, less than 55%, less than 50%, less than 45%, less than 40%, less than 35%, less than 30%, less than 25%, less than 20%, less than 15%, less than 10%, less than 5%, supplemental nitrogen (e.g., urea, ammonia, ammonium hydroxide) during fermentation to maintain the same yield of fermentation product (e.g., ethanol), when compared to an otherwise identical fermenting organism lacking the genetic modification that increases or decreases expression of a transporter, or regulator thereof. In some embodiments, the fermenting organism requires no supplemental nitrogen (e.g., urea, ammonia, ammonium hydroxide) during fermentation to maintain the same yield of fermentation product (e.g., ethanol), when compared to an otherwise identical fermenting organism lacking the genetic modification that increases or decreases expression of a transporter, or regulator thereof. Fermentaion product yields can be measures at about or after 10, 20, 30, 40 50, 60 or 70 hours fermentation.

[0465] In some embodiments, the fermenting organism efficiently utilizes tripeptides and/or tetrapeptides in the fermentation medium, thereby decreasing the residual concentration following fermentation. Methods of determining amount (e.g., concentration) of tripeptides and tetrapeptides in the fermentation medium are known in the art and described in the examples herein. In some embodiments, the fermenting organism decreases (or is capable of decreasing) the amount of residual tripeptides and/or tetrapeptides in the fermentation medium after 29 hours of fermentation (e.g., under conditions described herein), by at least 5%, e.g., 10%, 15%, 20%, 25%, 30%, 35%, 40%, 45%, 50%, 55%, 60%, 65%, 70%, 75%, 80%, 85%, 90%, or 95%, when compared to an otherwise identical fermenting organism lacking the genetic modification that increases or decreases expression of a transporter, or regulator thereof.

[0466] Simultaneous saccharification and fermentation (“SSF”) is widely used in industrial scale fermentation product production processes, especially ethanol production processes. When doing SSF the saccharification step a) and the fermentation step b) are carried out simultaneously. There is no holding stage for the saccharification, meaning that a fermenting organism, such as yeast, and enzyme(s), may be added together. However, it is also contemplated to add the fermenting organism and enzyme(s) separately. SSF is typically carried out at a temperature from 25° C. to 40° C., such as from 28° C. to 35° C., such as from 30° C. to 34° C., or about 32° C. In one embodiment, fermentation is ongoing for 6 to 120 hours, in particular 24 to 96 hours. In one embodiment, the pH is between 4-5.

[0467] In one embodiment, a cellulolytic enzyme composition is present and/or added in saccharification, fermentation or simultaneous saccharification and fermentation (SSF). Examples of such cellulolytic enzyme compositions can be found in the “Cellulolytic Enzyme Composition” section below. The cellulolytic enzyme composition may be present and/or added together with a glucoamylase, such as one disclosed in the “Glucoamylase in Saccharification and/or Fermentation” section below.

Glucoamylase in Saccharification and/or Fermentation

[0468] Glucoamylase may be present and/or added in saccharification, fermentation or simultaneous saccharification and fermentation (SSF).

[0469] As described supra, in some embodiments, the fermenting organism comprises a heterologous polynucleotide encoding a glucoamylase, for example, as described in WO2017/087330, the content of which is hereby incorporated by reference. Any glucoamylase described or referenced herein is contemplated for expression in the fermenting organism.

[0470] The glucoamylase may be any glucoamylase that is suitable for the host cells and/or the methods described herein, such as a naturally occurring glucoamylase or a variant thereof that retains glucoamylase activity.

[0471] In some embodiments, the fermenting organism comprising a heterologous polynucleotide encoding a glucoamylase has an increased level of glucoamylase activity compared to the host cells without the heterologous polynucleotide encoding the glucoamylase, when cultivated under the same conditions. In some embodiments, the fermenting organism has an increased level of glucoamylase activity of at least 5%, e.g., at least 10%, at least 15%, at least 20%, at least 25%, at least 50%, at least 100%, at least 150%, at least 200%, at least 300%, or at 500% compared to the fermenting organism without the heterologous polynucleotide encoding the glucoamylase, when cultivated under the same conditions.

[0472] Exemplary glucoamylases that can be used with the host cells and/or the methods described herein include bacterial, yeast, or filamentous fungal glucoamylases, e.g., obtained from any of the microorganisms described or referenced herein, as described supra.

[0473] The glucoamylase may be derived from any suitable source, e.g., derived from a microorganism or a plant. Preferred glucoamylases are of fungal or bacterial origin, selected from the group consisting of Aspergillus glucoamylases, in particular Aspergillus niger G1 or G2 glucoamylase (Boel et al. (1984), EMBO J. 3 (5), p. 1097-1102), or variants thereof, such as those disclosed in WO92/00381, WO00/04136 and WOO1/04273 (from Novozymes, Denmark); the A. awamori glucoamylase disclosed in WO84/02921, Aspergillus oryzae glucoamylase (Agric. Biol. Chem. (1991), 55 (4), p. 941-949), or variants or fragments thereof. Other Aspergillus glucoamylase variants include variants with enhanced thermal stability: G137A and G139A (Chen et al. (1996), Prot. Eng. 9, 499-505); D257E and D293E/Q (Chen et al. (1995), Prot. Eng. 8, 575-582); N182 (Chen et al. (1994), Biochem. J. 301, 275-281); disulphide bonds, A246C (Fierobe et al. (1996), Biochemistry, 35, 8698-8704; and introduction of Pro residues in position A435 and S436 (Li et al. (1997), Protein Eng. 10, 1199-1204.

[0474] Other glucoamylases include Athelia rolfsii (previously denoted Corticium rolfsii) glucoamylase (see U.S. Pat. No. 4,727,026 and (Nagasaka et al. (1998) “Purification and properties of the raw-starch-degrading glucoamylases from Corticium rolfsii, Appl Microbiol Biotechnol 50:323-330), Talaromyces glucoamylases, in particular derived from Talaromyces emersonii (WO99/28448), Talaromyces leycettanus (US patent no. Re. 32,153), Talaromyces duponti, Talaromyces thermophilus (U.S. Pat. No. 4,587,215). In one embodiment, the glucoamylase used during saccharification and/or fermentation is the Talaromyces emersonii glucoamylase disclosed in WO99/28448.

[0475] Bacterial glucoamylases contemplated include glucoamylases from the genus Clostridium, in particular C. thermoamylolyticum (EP 135,138), and C. thermohydrosulfuricum (WO86/01831).

[0476] Contemplated fungal glucoamylases include Trametes cingulate, Pachykytospora papyracea; and Leucopaxillus giganteus all disclosed in WO2006/069289; or Peniophora rufomarginata disclosed in WO2007/124285; or a mixture thereof. Hybrid glucoamylase are also contemplated. Examples include the hybrid glucoamylases disclosed in WO2005/045018.

[0477] In one embodiment, the glucoamylase is derived from a strain of the genus Pycnoporus, in particular a strain of Pycnoporus as described in WO2011/066576 (SEQ ID NO: 2, 4 or 6 therein), including the Pycnoporus sanguineus glucoamylase, or from a strain of the genus Gloeophyllum, such as a strain of Gloeophyllum sepiarium or Gloeophyllum trabeum, in particular a strain of Gloeophyllum as described in WO2011/068803 (SEQ ID NO: 2, 4, 6, 8, 10, 12, 14 or 16 therein). In one embodiment, the glucoamylase is SEQ ID NO: 2 in WO2011/068803 (i.e. Gloeophyllum sepiarium glucoamylase).

[0478] In one embodiment, the glucoamylase is a Gloeophyllum trabeum glucoamylase (disclosed as SEQ ID NO: 3 in WO2014/177546). In another embodiment, the glucoamylase is derived from a strain of the genus Nigrofomes, in particular a strain of Nigrofomes sp. disclosed in WO2012/064351 (SEQ ID NO: 2 therein).

[0479] Also contemplated are glucoamylases which exhibit a high identity to any of the above mentioned glucoamylases, i.e., at least 60%, such as at least 70%, at least 75%, at least 80%, at least 85%, at least 90%, at least 95%, at least 96%, at least 97%, at least 98%, at least 99% or even 100% identity to any one of the mature enzyme sequences mentioned above.

[0480] Glucoamylases may be added to the saccharification and/or fermentation in an amount of 0.0001-20 AGU/g DS, preferably 0.001-10 AGU/g DS, especially between 0.01-5 AGU/g DS, such as 0.1-2 AGU/g DS.

[0481] Glucoamylases may be added to the saccharification and/or fermentation in an amount of 1-1,000 μg EP/g DS, preferably 10-500 μg/gDS, especially between 25-250 μg/g DS.

[0482] In one embodiment, the glucoamylase is added as a blend further comprising an alpha-amylase. In one embodiment, the alpha-amylase is a fungal alpha-amylase, especially an acid fungal alpha-amylase. The alpha-amylase is typically a side activity.

[0483] In one embodiment, the glucoamylase is a blend comprising Talaromyces emersonii glucoamylase disclosed in WO99/28448 as SEQ ID NO: 34 and Trametes cingulata glucoamylase disclosed as SEQ ID NO: 2 in WOO6/069289.

[0484] In one embodiment, the glucoamylase is a blend comprising Talaromyces emersonii glucoamylase disclosed in WO99/28448 (SEQ ID NO: 19 herein), Trametes cingulata glucoamylase disclosed as SEQ ID NO: 2 in WOO6/69289, and an alpha-amylase.

[0485] In one embodiment, the glucoamylase is a blend comprising Talaromyces emersonii glucoamylase disclosed in WO99/28448, Trametes cingulata glucoamylase disclosed in WOO6/69289, and Rhizomucor pusillus alpha-amylase with Aspergillus niger glucoamylase linker and SBD disclosed as V039 in Table 5 in WO2006/069290.

[0486] In one embodiment, the glucoamylase is a blend comprising Gloeophyllum sepiarium glucoamylase shown as SEQ ID NO: 2 in WO2011/068803 and an alpha-amylase, in particular Rhizomucor pusillus alpha-amylase with an Aspergillus niger glucoamylase linker and starch-binding domain (SBD), disclosed SEQ ID NO: 3 in WO2013/006756, in particular with the following substitutions: G128D+D143N.

[0487] In one embodiment, the alpha-amylase may be derived from a strain of the genus Rhizomucor, preferably a strain the Rhizomucor pusillus, such as the one shown in SEQ ID NO: 3 in WO2013/006756, or the genus Meripilus, preferably a strain of Meripilus giganteus. In one embodiment, the alpha-amylase is derived from a Rhizomucor pusillus with an Aspergillus nigerglucoamylase linker and starch-binding domain (SBD), disclosed as V039 in Table 5 in WO2006/069290.

[0488] In one embodiment, the Rhizomucor pusillus alpha-amylase or the Rhizomucor pusillus alpha-amylase with an Aspergillus niger glucoamylase linker and starch-binding domain (SBD) has at least one of the following substitutions or combinations of substitutions: D165M; Y141W; Y141R; K136F; K192R; P224A; P224R; S123H+Y141W; G20S+Y141W; A76G+Y141W; G128D+Y141W; G128D+D143N; P219C+Y141W; N142D+D143N; Y141W+K192R; Y141W+D143N; Y141W+N383R; Y141W+P219C+A265C; Y141W+N142D+D143N; Y141W+K192R V410A; G128D+Y141W+D143N; Y141W+D143N+P219C; Y141W+D143N+K192R; G128D+D143N+K192R; Y141W+D143N+K192R+P219C; and G128D+Y141W+D143N+K192R; or G128D+Y141W+D143N+K192R+P219C (using SEQ ID NO: 3 in WO2013/006756 for numbering).

[0489] In one embodiment, the glucoamylase blend comprises Gloeophyllum sepiarium glucoamylase (e.g., SEQ ID NO: 2 in WO2011/068803) and Rhizomucor pusillus alpha-amylase.

[0490] In one embodiment, the glucoamylase blend comprises Gloeophyllum sepiarium glucoamylase shown as SEQ ID NO: 2 in WO2011/068803 and Rhizomucor pusillus with an Aspergillus niger glucoamylase linker and starch-binding domain (SBD), disclosed SEQ ID NO: 3 in WO2013/006756 with the following substitutions: G128D+D143N.

[0491] Commercially available compositions comprising glucoamylase include AMG 200L; AMG 300 L; SAN™ SUPER, SAN™ EXTRA L, SPIRIZYME™ PLUS, SPIRIZYME™ FUEL, SPIRIZYME™ B4U, SPIRIZYME™ ULTRA, SPIRIZYME™ EXCEL, SPIRIZYMEACHIEVE™ and AMG™ E (from Novozymes A/S); OPTIDEX™ 300, GC480, GC417 (from DuPont-Danisco); AMIGASE™ and AMIGASE™ PLUS (from DSM); G-ZYME™ G900, G-ZYME™ and G990 ZR (from DuPont-Danisco).

[0492] In one embodiment, the glucoamylase is derived from the Debaryomyces occidentalis glucoamylase shown as SEQ ID NO: 102 in WO2018/222990. In one embodiment, the glucoamylase is derived from the Saccharomycopsis fibuligera glucoamylase shown as SEQ ID NO: 103 of WO2018/222990. In one embodiment, the glucoamylase is derived from the Saccharomycopsis fibuligera glucoamylase shown as SEQ ID NO: 104 of WO2018/222990. In one embodiment, the glucoamylase is derived from the Saccharomyces cerevisiae glucoamylase shown as SEQ ID NO: 105 of WO2018/222990. In one embodiment, the glucoamylase is derived from the Aspergillus niger glucoamylase shown as SEQ ID NO: 106 of WO2018/222990. In one embodiment, the glucoamylase is derived from the Aspergillus oryzae glucoamylase shown as SEQ ID NO: 107 of WO2018/222990. In one embodiment, the glucoamylase is derived from the Rhizopus oryzae glucoamylase shown as SEQ ID NO: 108 of WO2018/222990. In one embodiment, the glucoamylase is derived from the Clostridium thermocellum glucoamylase shown as SEQ ID NO: 109 of WO2018/222990. In one embodiment, the glucoamylase is derived from the Clostridium thermocellum glucoamylase shown as SEQ ID NO: 110 of WO2018/222990. In one embodiment, the glucoamylase is derived from the Arxula adeninivorans glucoamylase shown as SEQ ID NO: 111 of WO2018/222990. In one embodiment, the glucoamylase is derived from the Hormoconis resinae glucoamylase shown as SEQ ID NO: 112 of WO2018/222990. In one embodiment, the glucoamylase is derived from the Aureobasidium pullulans glucoamylase shown as SEQ ID NO: 113 of WO2018/222990.

[0493] Additional glucoamylases contemplated for use with the present invention can be found in WO2011/153516 (the content of which is incorporated herein).

[0494] Additional polynucleotides encoding suitable glucoamylases may be obtained from microorganisms of any genus, including those readily available within the UniProtKB database (www.uniprot.org).

[0495] The glucoamylase coding sequences can also be used to design nucleic acid probes to identify and clone DNA encoding glucoamylases from strains of different genera or species, as described supra.

[0496] The polynucleotides encoding glucoamylases may also be identified and obtained from other sources including microorganisms isolated from nature (e.g., soil, composts, water, etc.) or DNA samples obtained directly from natural materials (e.g., soil, composts, water, etc,) as described supra.

[0497] Techniques used to isolate or clone polynucleotides encoding glucoamylases are described supra.

[0498] In one embodiment, the glucoamylase has at least 60%, e.g., at least 65%, at least 70%, at least 75%, at least 80%, at least 85%, at least 90%, at least 91%, at least 92%, at least 93%, at least 94%, at least 95%, at least 96%, at least 97%, at least 98%, at least 99%, or 100% sequence identity to any glucoamylase described or referenced herein (e.g., the Saccharomycopsis fibuligera glucoamylase shown as SEQ ID NO: 103 or 104 of WO2018/222990). In one aspect, the glucoamylase sequence differs by no more than ten amino acids, e.g., by no more than five amino acids, by no more than four amino acids, by no more than three amino acids, by no more than two amino acids, or by one amino acid from any glucoamylase described or referenced herein (e.g., the Saccharomycopsis fibuligera glucoamylase shown as SEQ ID NO: 103 or 104 of WO2018/222990). In one embodiment, the glucoamylase comprises or consists of the amino acid sequence of any glucoamylase described or referenced herein (e.g., the Saccharomycopsis fibuligera glucoamylase shown as SEQ ID NO: 103 or 104 of WO2018/222990), allelic variant, or a fragment thereof having glucoamylase activity. In one embodiment, the glucoamylase has an amino acid substitution, deletion, and/or insertion of one or more (e.g., two, several) amino acids. In some embodiments, the total number of amino acid substitutions, deletions and/or insertions is not more than 10, e.g., not more than 9, 8, 7, 6, 5, 4, 3, 2, or 1.

[0499] In some embodiments, the glucoamylase has at least 20%, e.g., at least 40%, at least 50%, at least 60%, at least 70%, at least 80%, at least 90%, at least 95%, at least 96%, at least 97%, at least 98%, at least 99%, or 100% of the glucoamylase activity of any glucoamylase described or referenced herein (e.g., the Saccharomycopsis fibuligera glucoamylase shown as SEQ ID NO: 103 or 104 of WO2018/222990) under the same conditions.

[0500] In one embodiment, the glucoamylase coding sequence hybridizes under at least low stringency conditions, e.g., medium stringency conditions, medium-high stringency conditions, high stringency conditions, or very high stringency conditions with the full-length complementary strand of the coding sequence from any glucoamylase described or referenced herein (e.g., the Saccharomycopsis fibuligera glucoamylase shown as SEQ ID NO: 103 or 104 of WO2018/222990). In one embodiment, the glucoamylase coding sequence has at least 65%, e.g., at least 70%, at least 75%, at least 80%, at least 85%, at least 85%, at least 90%, at least 91%, at least 92%, at least 93%, at least 94%, at least 95%, at least 96%, at least 97%, at least 98%, at least 99%, or 100% sequence identity with the coding sequence from any glucoamylase described or referenced herein (e.g., the Saccharomycopsis fibuligera glucoamylase shown as SEQ ID NO: 103 or 104 of WO2018/222990).

[0501] In one embodiment, the polynucleotide encoding the glucoamylase comprises the coding sequence of any glucoamylase described or referenced herein (e.g., the Saccharomycopsis fibuligera glucoamylase shown as SEQ ID NO: 103 or 104 of WO2018/222990). In one embodiment, the polynucleotide encoding the glucoamylase comprises a subsequence of the coding sequence from any glucoamylase described or referenced herein, wherein the subsequence encodes a polypeptide having glucoamylase activity. In one embodiment, the number of nucleotides residues in the subsequence is at least 75%, e.g., at least 80%, 85%, 90%, or 95% of the number of the referenced coding sequence.

[0502] The glucoamylase can also include fused polypeptides or cleavable fusion polypeptides, as described supra.

### Methods Using a Cellulosic-Containing Material

[0503] In some aspects, the methods described herein produce a fermentation product from a cellulosic-containing material. The predominant polysaccharide in the primary cell wall of biomass is cellulose, the second most abundant is hemicellulose, and the third is pectin. The secondary cell wall, produced after the cell has stopped growing, also contains polysaccharides and is strengthened by polymeric lignin covalently cross-linked to hemicellulose. Cellulose is a homopolymer of anhydrocellobiose and thus a linear beta-(1-4)-D-glucan, while hemicelluloses include a variety of compounds, such as xylans, xyloglucans, arabinoxylans, and mannans in complex branched structures with a spectrum of substituents. Although generally polymorphous, cellulose is found in plant tissue primarily as an insoluble crystalline matrix of parallel glucan chains. Hemicelluloses usually hydrogen bond to cellulose, as well as to other hemicelluloses, which help stabilize the cell wall matrix.

[0504] Cellulose is generally found, for example, in the stems, leaves, hulls, husks, and cobs of plants or leaves, branches, and wood of trees. The cellulosic-containing material can be, but is not limited to, agricultural residue, herbaceous material (including energy crops), municipal solid waste, pulp and paper mill residue, waste paper, and wood (including forestry residue) (see, for example, Wiselogel et al., 1995, in Handbook on Bioethanol (Charles E. Wyman, editor), pp. 105-118, Taylor & Francis, Washington D.C.; Wyman, 1994, Bioresource Technology 50: 3-16; Lynd, 1990, Applied Biochemistry and Biotechnology 24/25: 695-719; Mosier et al., 1999, Recent Progress in Bioconversion of Lignocellulosics, in Advances in Biochemical Engineering/Biotechnology, T. Scheper, managing editor, Volume 65, pp. 23-40, Springer-Verlag, New York). It is understood herein that the cellulose may be in the form of lignocellulose, a plant cell wall material containing lignin, cellulose, and hemicellulose in a mixed matrix. In one embodiment, the cellulosic-containing material is any biomass material.

[0505] In another embodiment, the cellulosic-containing material is lignocellulose, which comprises cellulose, hemicelluloses, and lignin.

[0506] In one embodiment, the cellulosic-containing material is agricultural residue, herbaceous material (including energy crops), municipal solid waste, pulp and paper mill residue, waste paper, or wood (including forestry residue).

[0507] In another embodiment, the cellulosic-containing material is arundo, bagasse, bamboo, corn cob, corn fiber, corn stover, miscanthus, rice straw, switchgrass, or wheat straw.

[0508] In another embodiment, the cellulosic-containing material is aspen, eucalyptus, fir, pine, poplar, spruce, or willow.

[0509] In another embodiment, the cellulosic-containing material is algal cellulose, bacterial cellulose, cotton linter, filter paper, microcrystalline cellulose (e.g., AVICEL®), or phosphoric-acid treated cellulose.

[0510] In another embodiment, the cellulosic-containing material is an aquatic biomass. As used herein the term “aquatic biomass” means biomass produced in an aquatic environment by a photosynthesis process. The aquatic biomass can be algae, emergent plants, floating-leaf plants, or submerged plants.

[0511] The cellulosic-containing material may be used as is or may be subjected to pretreatment, using conventional methods known in the art, as described herein. In a preferred embodiment, the cellulosic-containing material is pretreated.

[0512] The methods of using cellulosic-containing material can be accomplished using methods conventional in the art. Moreover, the methods of can be implemented using any conventional biomass processing apparatus configured to carry out the processes.

### Cellulosic Pretreatment

[0513] In one embodiment the cellulosic-containing material is pretreated before saccharification in step (a).

[0514] In practicing the processes described herein, any pretreatment process known in the art can be used to disrupt plant cell wall components of the cellulosic-containing material (Chandra et al., 2007, Adv. Biochem. Engin./Biotechnol. 108: 67-93; Galbe and Zacchi, 2007, Adv. Biochem. Engin./Biotechnol. 108: 41-65; Hendriks and Zeeman, 2009, Bioresource Technology 100: 10-18; Mosier et al., 2005, Bioresource Technology 96: 673-686; Taherzadeh and Karimi, 2008, Int. J. Mol. Sci. 9:1621-1651; Yang and Wyman, 2008, Biofuels Bioproducts and Biorefining-Biofpr. 2: 26-40).

[0515] The cellulosic-containing material can also be subjected to particle size reduction, sieving, pre-soaking, wetting, washing, and/or conditioning prior to pretreatment using methods known in the art.

[0516] Conventional pretreatments include, but are not limited to, steam pretreatment (with or without explosion), dilute acid pretreatment, hot water pretreatment, alkaline pretreatment, lime pretreatment, wet oxidation, wet explosion, ammonia fiber explosion, organosolv pretreatment, and biological pretreatment. Additional pretreatments include ammonia percolation, ultrasound, electroporation, microwave, supercritical CO₂, supercritical H₂O, ozone, ionic liquid, and gamma irradiation pretreatments.

[0517] In a one embodiment, the cellulosic-containing material is pretreated before saccharification (i.e., hydrolysis) and/or fermentation. Pretreatment is preferably performed prior to the hydrolysis. Alternatively, the pretreatment can be carried out simultaneously with enzyme hydrolysis to release fermentable sugars, such as glucose, xylose, and/or cellobiose.

[0518] In most cases the pretreatment step itself results in some conversion of biomass to fermentable sugars (even in absence of enzymes).

[0519] In one embodiment, the cellulosic-containing material is pretreated with steam. In steam pretreatment, the cellulosic-containing material is heated to disrupt the plant cell wall components, including lignin, hemicellulose, and cellulose to make the cellulose and other fractions, e.g., hemicellulose, accessible to enzymes. The cellulosic-containing material is passed to or through a reaction vessel where steam is injected to increase the temperature to the required temperature and pressure and is retained therein for the desired reaction time. Steam pretreatment is preferably performed at 140-250° C., e.g., 160-200° C. or 170-190° C., where the optimal temperature range depends on optional addition of a chemical catalyst. Residence time for the steam pretreatment is preferably 1-60 minutes, e.g., 1-30 minutes, 1-20 minutes, 3-12 minutes, or 4-10 minutes, where the optimal residence time depends on the temperature and optional addition of a chemical catalyst. Steam pretreatment allows for relatively high solids loadings, so that the cellulosic-containing material is generally only moist during the pretreatment. The steam pretreatment is often combined with an explosive discharge of the material after the pretreatment, which is known as steam explosion, that is, rapid flashing to atmospheric pressure and turbulent flow of the material to increase the accessible surface area by fragmentation (Duff and Murray, 1996, Bioresource Technology 855: 1-33; Galbe and Zacchi, 2002, Appl. Microbiol. Biotechnol. 59: 618-628; U.S. Patent Application No. 2002/0164730). During steam pretreatment, hemicellulose acetyl groups are cleaved and the resulting acid autocatalyzes partial hydrolysis of the hemicellulose to monosaccharides and oligosaccharides. Lignin is removed to only a limited extent.

[0520] In one embodiment, the cellulosic-containing material is subjected to a chemical pretreatment. The term “chemical treatment” refers to any chemical pretreatment that promotes the separation and/or release of cellulose, hemicellulose, and/or lignin. Such a pretreatment can convert crystalline cellulose to amorphous cellulose. Examples of suitable chemical pretreatment processes include, for example, dilute acid pretreatment, lime pretreatment, wet oxidation, ammonia fiber/freeze expansion (AFEX), ammonia percolation (APR), ionic liquid, and organosolv pretreatments.

[0521] A chemical catalyst such as H₂SO₄ or SO₂ (typically 0.3 to 5% w/w) is sometimes added prior to steam pretreatment, which decreases the time and temperature, increases the recovery, and improves enzymatic hydrolysis (Ballesteros et al., 2006, Appl. Biochem. Biotechnol. 129-132: 496-508; Varga et al., 2004, Appl. Biochem. Biotechnol. 113-116: 509-523; Sassner et al., 2006, Enzyme Microb. Technol. 39: 756-762). In dilute acid pretreatment, the cellulosic-containing material is mixed with dilute acid, typically H₂SO₄, and water to form a slurry, heated by steam to the desired temperature, and after a residence time flashed to atmospheric pressure. The dilute acid pretreatment can be performed with a number of reactor designs, e.g., plug-flow reactors, counter-current reactors, or continuous counter-current shrinking bed reactors (Duff and Murray, 1996, Bioresource Technology 855: 1-33; Schell et al., 2004, Bioresource Technology 91: 179-188; Lee et al., 1999, Adv. Biochem. Eng. Biotechnol. 65: 93-115). In a specific embodiment the dilute acid pretreatment of cellulosic-containing material is carried out using 4% w/w sulfuric acid at 180° C. for 5 minutes.

[0522] Several methods of pretreatment under alkaline conditions can also be used. These alkaline pretreatments include, but are not limited to, sodium hydroxide, lime, wet oxidation, ammonia percolation (APR), and ammonia fiber/freeze expansion (AFEX) pretreatment. Lime pretreatment is performed with calcium oxide or calcium hydroxide at temperatures of 85-150° C. and residence times from one hour to several days (Wyman et al., 2005, Bioresource Technology 96: 1959-1966; Mosier et al., 2005, Bioresource Technology 96: 673-686). WO2006/110891, WO2006/110899, WO2006/110900, and WO2006/110901 disclose pretreatment methods using ammonia.

[0523] Wet oxidation is a thermal pretreatment performed typically at 180-200° C. for 5-15 minutes with addition of an oxidative agent such as hydrogen peroxide or over-pressure of oxygen (Schmidt and Thomsen, 1998, Bioresource Technology 64: 139-151; Palonen et al., 2004, Appl. Biochem. Biotechnol. 117: 1-17; Varga et al., 2004, Biotechnol. Bioeng. 88: 567-574; Martin et al., 2006, J. Chem. Technol. Biotechnol. 81: 1669-1677). The pretreatment is performed preferably at 1-40% dry matter, e.g., 2-30% dry matter or 5-20% dry matter, and often the initial pH is increased by the addition of alkali such as sodium carbonate.

[0524] A modification of the wet oxidation pretreatment method, known as wet explosion (combination of wet oxidation and steam explosion) can handle dry matter up to 30%. In wet explosion, the oxidizing agent is introduced during pretreatment after a certain residence time. The pretreatment is then ended by flashing to atmospheric pressure (WO2006/032282).

[0525] Ammonia fiber expansion (AFEX) involves treating the cellulosic-containing material with liquid or gaseous ammonia at moderate temperatures such as 90-150° C. and high pressure such as 17-20 bar for 5-10 minutes, where the dry matter content can be as high as 60% (Gollapalli et al., 2002, Appl. Biochem. Biotechnol. 98: 23-35; Chundawat et al., 2007, Biotechnol. Bioeng. 96: 219-231; Alizadeh et al., 2005, Appl. Biochem. Biotechnol. 121: 1133-1141; Teymouri et al., 2005, Bioresource Technology 96: 2014-2018). During AFEX pretreatment cellulose and hemicelluloses remain relatively intact. Lignin-carbohydrate complexes are cleaved.

[0526] Organosolv pretreatment delignifies the cellulosic-containing material by extraction using aqueous ethanol (40-60% ethanol) at 160-200° C. for 30-60 minutes (Pan et al., 2005, Biotechnol. Bioeng. 90: 473-481; Pan et al., 2006, Biotechnol. Bioeng. 94: 851-861; Kurabi et al., 2005, Appl. Biochem. Biotechnol. 121: 219-230). Sulphuric acid is usually added as a catalyst. In organosolv pretreatment, the majority of hemicellulose and lignin is removed.

[0527] Other examples of suitable pretreatment methods are described by Schell et al., 2003, Appl. Biochem. Biotechnol. 105-108: 69-85, and Mosier et al., 2005, Bioresource Technology 96: 673-686, and U.S. Published Application 2002/0164730.

[0528] In one embodiment, the chemical pretreatment is carried out as a dilute acid treatment, and more preferably as a continuous dilute acid treatment. The acid is typically sulfuric acid, but other acids can also be used, such as acetic acid, citric acid, nitric acid, phosphoric acid, tartaric acid, succinic acid, hydrogen chloride, or mixtures thereof. Mild acid treatment is conducted in the pH range of preferably 1-5, e.g., 1-4 or 1-2.5. In one aspect, the acid concentration is in the range from preferably 0.01 to 10 wt. % acid, e.g., 0.05 to 5 wt. % acid or 0.1 to 2 wt. % acid. The acid is contacted with the cellulosic-containing material and held at a temperature in the range of preferably 140-200° C., e.g., 165-190° C., for periods ranging from 1 to 60 minutes.

[0529] In another embodiment, pretreatment takes place in an aqueous slurry. In preferred aspects, the cellulosic-containing material is present during pretreatment in amounts preferably between 10-80 wt. %, e.g., 20-70 wt. % or 30-60 wt. %, such as around 40 wt. %. The pretreated cellulosic-containing material can be unwashed or washed using any method known in the art, e.g., washed with water.

[0530] In one embodiment, the cellulosic-containing material is subjected to mechanical or physical pretreatment. The term “mechanical pretreatment” or “physical pretreatment” refers to any pretreatment that promotes size reduction of particles. For example, such pretreatment can involve various types of grinding or milling (e.g., dry milling, wet milling, or vibratory ball milling).

[0531] The cellulosic-containing material can be pretreated both physically (mechanically) and chemically. Mechanical or physical pretreatment can be coupled with steaming/steam explosion, hydrothermolysis, dilute or mild acid treatment, high temperature, high pressure treatment, irradiation (e.g., microwave irradiation), or combinations thereof. In one aspect, high pressure means pressure in the range of preferably about 100 to about 400 psi, e.g., about 150 to about 250 psi. In another aspect, high temperature means temperature in the range of about 100 to about 300° C., e.g., about 140 to about 200° C. In a preferred aspect, mechanical or physical pretreatment is performed in a batch-process using a steam gun hydrolyzer system that uses high pressure and high temperature as defined above, e.g., a Sunds Hydrolyzer available from Sunds Defibrator AB, Sweden. The physical and chemical pretreatments can be carried out sequentially or simultaneously, as desired.

[0532] Accordingly, in one embodiment, the cellulosic-containing material is subjected to physical (mechanical) or chemical pretreatment, or any combination thereof, to promote the separation and/or release of cellulose, hemicellulose, and/or lignin.

[0533] In one embodiment, the cellulosic-containing material is subjected to a biological pretreatment. The term “biological pretreatment” refers to any biological pretreatment that promotes the separation and/or release of cellulose, hemicellulose, and/or lignin from the cellulosic-containing material. Biological pretreatment techniques can involve applying lignin-solubilizing microorganisms and/or enzymes (see, for example, Hsu, T.-A., 1996, Pretreatment of biomass, in Handbook on Bioethanol: Production and Utilization, Wyman, C. E., ed., Taylor & Francis, Washington, D.C., 179-212; Ghosh and Singh, 1993, Adv. Appl. Microbiol. 39: 295-333; McMillan, J. D., 1994, Pretreating lignocellulosic biomass: a review, in Enzymatic Conversion of Biomass for Fuels Production, Himmel, M. E., Baker, J. O., and Overend, R. P., eds., ACS Symposium Series 566, American Chemical Society, Washington, D.C., chapter 15; Gong, C. S., Cao, N. J., Du, J., and Tsao, G. T., 1999, Ethanol production from renewable resources, in Advances in Biochemical Engineering/Biotechnology, Scheper, T., ed., Springer-Verlag Berlin Heidelberg, Germany, 65: 207-241; Olsson and Hahn-Hagerdal, 1996, Enz. Microb. Tech. 18: 312-331; and Vallander and Eriksson, 1990, Adv. Biochem. Eng./Biotechnol. 42: 63-95).

### Saccharification and Fermentation of Cellulosic-Containing Material

[0534] Saccharification (i.e., hydrolysis) and fermentation, separate or simultaneous, include, but are not limited to, separate hydrolysis and fermentation (SHF); simultaneous saccharification and fermentation (SSF); simultaneous saccharification and co-fermentation (SSCF); hybrid hydrolysis and fermentation (HHF); separate hydrolysis and co-fermentation (SHCF); hybrid hydrolysis and co-fermentation (HHCF).

[0535] SHF uses separate process steps to first enzymatically hydrolyze the cellulosic-containing material to fermentable sugars, e.g., glucose, cellobiose, and pentose monomers, and then ferment the fermentable sugars to ethanol. In SSF, the enzymatic hydrolysis of the cellulosic-containing material and the fermentation of sugars to ethanol are combined in one step (Philippidis, G. P., 1996, Cellulose bioconversion technology, in Handbook on Bioethanol: Production and Utilization, Wyman, C. E., ed., Taylor & Francis, Washington, D.C., 179-212). SSCF involves the co-fermentation of multiple sugars (Sheehan and Himmel, 1999, Biotechnol. Prog. 15: 817-827). HHF involves a separate hydrolysis step, and in addition a simultaneous saccharification and hydrolysis step, which can be carried out in the same reactor. The steps in an HHF process can be carried out at different temperatures, i.e., high temperature enzymatic saccharification followed by SSF at a lower temperature that the fermentation organismcan tolerate. It is understood herein that any method known in the art comprising pretreatment, enzymatic hydrolysis (saccharification), fermentation, or a combination thereof, can be used in the practicing the processes described herein.

[0536] A conventional apparatus can include a fed-batch stirred reactor, a batch stirred reactor, a continuous flow stirred reactor with ultrafiltration, and/or a continuous plug-flow column reactor (de Castilhos Corazza et al., 2003, Acta Scientiarum. Technology 25: 33-38; Gusakov and Sinitsyn, 1985, Enz. Microb. Technol. 7: 346-352), an attrition reactor (Ryu and Lee, 1983, Biotechnol. Bioeng. 25: 53-65). Additional reactor types include fluidized bed, upflow blanket, immobilized, and extruder type reactors for hydrolysis and/or fermentation.

[0537] In the saccharification step (i.e., hydrolysis step), the cellulosic and/or starch-containing material, e.g., pretreated, is hydrolyzed to break down cellulose, hemicellulose, and/or starch to fermentable sugars, such as glucose, cellobiose, xylose, xylulose, arabinose, mannose, galactose, and/or soluble oligosaccharides. The hydrolysis is performed enzymatically e.g., by a cellulolytic enzyme composition. The enzymes of the compositions can be added simultaneously or sequentially.

[0538] Enzymatic hydrolysis may be carried out in a suitable aqueous environment under conditions that can be readily determined by one skilled in the art. In one aspect, hydrolysis is performed under conditions suitable for the activity of the enzymes(s), i.e., optimal for the enzyme(s). The hydrolysis can be carried out as a fed batch or continuous process where the cellulosic and/or starch-containing material is fed gradually to, for example, an enzyme containing hydrolysis solution.

[0539] The saccharification is generally performed in stirred-tank reactors or fermentors under controlled pH, temperature, and mixing conditions. Suitable process time, temperature and pH conditions can readily be determined by one skilled in the art. For example, the saccharification can last up to 200 hours, but is typically performed for preferably about 12 to about 120 hours, e.g., about 16 to about 72 hours or about 24 to about 48 hours. The temperature is in the range of preferably about 25° C. to about 70° C., e.g., about 30° C. to about 65° C., about 40° C. to about 60° C., or about 50° C. to about 55° C. The pH is in the range of preferably about 3 to about 8, e.g., about 3.5 to about 7, about 4 to about 6, or about 4.5 to about 5.5. The dry solids content is in the range of preferably about 5 to about 50 wt. %, e.g., about 10 to about 40 wt. % or about 20 to about 30 wt. %.

[0540] Saccharification in step (a) may be carried out using a cellulolytic enzyme composition. Such enzyme compositions are described below in the “Cellulolytic Enzyme Composition”—section below. The cellulolytic enzyme compositions can comprise any protein useful in degrading the cellulosic-containing material. In one aspect, the cellulolytic enzyme composition comprises or further comprises one or more (e.g., two, several) proteins selected from the group consisting of a cellulase, an AA9 (GH61) polypeptide, a hemicellulase, an esterase, an expansin, a ligninolytic enzyme, an oxidoreductase, a pectinase, a protease, and a swollenin.

[0541] In another embodiment, the cellulase is preferably one or more (e.g., two, several) enzymes selected from the group consisting of an endoglucanase, a cellobiohydrolase, and a beta-glucosidase.

[0542] In another embodiment, the hemicellulase is preferably one or more (e.g., two, several) enzymes selected from the group consisting of an acetylmannan esterase, an acetylxylan esterase, an arabinanase, an arabinofuranosidase, a coumaric acid esterase, a feruloyl esterase, a galactosidase, a glucuronidase, a glucuronoyl esterase, a mannanase, a mannosidase, a xylanase, and a xylosidase. In another embodiment, the oxidoreductase is one or more (e.g., two, several) enzymes selected from the group consisting of a catalase, a laccase, and a peroxidase.

[0543] The enzymes or enzyme compositions used in a processes of the present invention may be in any form suitable for use, such as, for example, a fermentation broth formulation or a cell composition, a cell lysate with or without cellular debris, a semi-purified or purified enzyme preparation, or a host cell as a source of the enzymes. The enzyme composition may be a dry powder or granulate, a non-dusting granulate, a liquid, a stabilized liquid, or a stabilized protected enzyme. Liquid enzyme preparations may, for instance, be stabilized by adding stabilizers such as a sugar, a sugar alcohol or another polyol, and/or lactic acid or another organic acid according to established processes.

[0544] In one embodiment, an effective amount of cellulolytic or hemicellulolytic enzyme composition to the cellulosic-containing material is about 0.5 to about 50 mg, e.g., about 0.5 to about 40 mg, about 0.5 to about 25 mg, about 0.75 to about 20 mg, about 0.75 to about 15 mg, about 0.5 to about 10 mg, or about 2.5 to about 10 mg per g of the cellulosic-containing material.

[0545] In one embodiment, such a compound is added at a molar ratio of the compound to glucosyl units of cellulose of about 10⁻⁶ to about 10, e.g., about 10⁻⁶ to about 7.5, about 10⁻⁶ to about 5, about 10⁻⁶ to about 2.5, about 10⁻⁶ to about 1, about 10⁻⁵ to about 1, about 10⁻⁵ to about 10⁻¹, about 10⁻⁴ to about 10⁻¹, about 10⁻³ to about 10⁻¹, or about 10⁻³ to about 10⁻². In another aspect, an effective amount of such a compound is about 0.1 μM to about 1 M, e.g., about 0.5 μM to about 0.75 M, about 0.75 μM to about 0.5 M, about 1 μM to about 0.25 M, about 1 μM to about 0.1 M, about 5 μM to about 50 mM, about 10 μM to about 25 mM, about 50 μM to about 25 mM, about 10 μM to about 10 mM, about 5 μM to about 5 mM, or about 0.1 mM to about 1 mM.

[0546] The term “liquor” means the solution phase, either aqueous, organic, or a combination thereof, arising from treatment of a lignocellulose and/or hemicellulose material in a slurry, or monosaccharides thereof, e.g., xylose, arabinose, mannose, etc., under conditions as described in WO2012/021401, and the soluble contents thereof. A liquor for cellulolytic enhancement of an AA9 polypeptide (GH61 polypeptide) can be produced by treating a lignocellulose or hemicellulose material (or feedstock) by applying heat and/or pressure, optionally in the presence of a catalyst, e.g., acid, optionally in the presence of an organic solvent, and optionally in combination with physical disruption of the material, and then separating the solution from the residual solids. Such conditions determine the degree of cellulolytic enhancement obtainable through the combination of liquor and an AA9 polypeptide during hydrolysis of a cellulosic substrate by a cellulolytic enzyme preparation. The liquor can be separated from the treated material using a method standard in the art, such as filtration, sedimentation, or centrifugation.

[0547] In one embodiment, an effective amount of the liquor to cellulose is about 10⁻⁶ to about 10 g per g of cellulose, e.g., about 10⁻⁶ to about 7.5 g, about 10⁻⁶ to about 5 g, about 10⁻⁶ to about 2.5 g, about 10⁻⁶ to about 1 g, about 10⁻⁵ to about 1 g, about 10⁻⁵ to about 10⁻¹ g, about 10⁻⁴ to about 10⁻¹ g, about 10⁻³ to about 10⁻¹ g, or about 10⁻³ to about 10⁻² g per g of cellulose.

[0548] In the fermentation step, sugars, released from the cellulosic-containing material, e.g., as a result of the pretreatment and enzymatic hydrolysis steps, are fermented to ethanol, by a fermenting organism, such as yeast described herein. Hydrolysis (saccharification) and fermentation can be separate or simultaneous.

[0549] Any suitable hydrolyzed cellulosic-containing material can be used in the fermentation step in practicing the processes described herein. Such feedstocks include, but are not limited to carbohydrates (e.g., lignocellulose, xylans, cellulose, starch, etc.). The material is generally selected based on economics, i.e., costs per equivalent sugar potential, and recalcitrance to enzymatic conversion.

[0550] Production of ethanol by a fermenting organism using cellulosic-containing material results from the metabolism of sugars (monosaccharides). The sugar composition of the hydrolyzed cellulosic-containing material and the ability of the fermenting organism to utilize the different sugars has a direct impact in process yields.

[0551] Compositions of the fermentation media and fermentation conditions depend on the fermenting organism and can easily be determined by one skilled in the art. Typically, the fermentation takes place under conditions known to be suitable for generating the fermentation product. In some embodiments, the fermentation process is carried out under aerobic or microaerophilic (i.e., where the concentration of oxygen is less than that in air), or anaerobic conditions. In some embodiments, fermentation is conducted under anaerobic conditions (i.e., no detectable oxygen), or less than about 5, about 2.5, or about 1 mmol/L/h oxygen. In the absence of oxygen, the NADH produced in glycolysis cannot be oxidized by oxidative phosphorylation. Under anaerobic conditions, pyruvate or a derivative thereof may be utilized by the host cell as an electron and hydrogen acceptor in order to generate NAD+.

[0552] The fermentation process is typically run at a temperature that is optimal for the recombinant fungal cell. For example, in some embodiments, the fermentation process is performed at a temperature in the range of from about 25° C. to about 42° C. Typically the process is carried out a temperature that is less than about 38° C., less than about 35° C., less than about 33° C., or less than about 38° C., but at least about 20° C., 22° C., or 25° C.

[0553] A fermentation stimulator can be used in a process described herein to further improve the fermentation, and in particular, the performance of the fermenting organism, such as, rate enhancement and product yield (e.g., ethanol yield). A “fermentation stimulator” refers to stimulators for growth of the fermenting organisms, in particular, yeast. Preferred fermentation stimulators for growth include vitamins and minerals. Examples of vitamins include multivitamins, biotin, pantothenate, nicotinic acid, meso-inositol, thiamine, pyridoxine, para-aminobenzoic acid, folic acid, riboflavin, and Vitamins A, B, C, D, and E. See, for example, Alfenore et al., Improving ethanol production and viability of Saccharomyces cerevisiae by a vitamin feeding strategy during fed-batch process, Springer-Verlag (2002), which is hereby incorporated by reference. Examples of minerals include minerals and mineral salts that can supply nutrients comprising P, K, Mg, S, Ca, Fe, Zn, Mn, and Cu.

### Cellulolytic Enzymes and Compositions

[0554] A cellulolytic enzyme or cellulolytic enzyme composition may be present and/or added during saccharification in step (a). A cellulolytic enzyme composition is an enzyme preparation containing one or more (e.g., two, several) enzymes that hydrolyze cellulosic-containing material. Such enzymes include endoglucanase, cellobiohydrolase, beta-glucosidase, and/or combinations thereof.

[0555] In some embodiments, the fermenting organism comprises one or more (e.g., two, several) heterologous polynucleotides encoding enzymes that hydrolyze cellulosic-containing material (e.g., an endoglucanase, cellobiohydrolase, beta-glucosidase or combinations thereof). Any enzyme described or referenced herein that hydrolyzes cellulosic-containing material is contemplated for expression in the fermenting organism.

[0556] The cellulolytic enzyme may be any cellulolytic enzyme that is suitable for the host cells and/or the methods described herein (e.g., an endoglucanase, cellobiohydrolase, beta-glucosidase), such as a naturally occurring cellulolytic enzyme or a variant thereof that retains cellulolytic enzyme activity.

[0557] In some embodiments, the fermenting organism comprising a heterologous polynucleotide encoding a cellulolytic enzyme has an increased level of cellulolytic enzyme activity (e.g., increased endoglucanase, cellobiohydrolase, and/or beta-glucosidase) compared to the host cells without the heterologous polynucleotide encoding the cellulolytic enzyme, when cultivated under the same conditions. In some embodiments, the fermenting organism has an increased level of cellulolytic enzyme activity of at least 5%, e.g., at least 10%, at least 15%, at least 20%, at least 25%, at least 50%, at least 100%, at least 150%, at least 200%, at least 300%, or at 500% compared to the fermenting organism without the heterologous polynucleotide encoding the cellulolytic enzyme, when cultivated under the same conditions.

[0558] Exemplary cellulolytic enzymes that can be used with the host cells and/or the methods described herein include bacterial, yeast, or filamentous fungal cellulolytic enzymes, e.g., obtained from any of the microorganisms described or referenced herein, as described supra.

[0559] The cellulolytic enzyme may be of any origin. In an embodiment the cellulolytic enzyme is derived from a strain of Trichoderma, such as a strain of Trichoderma reesei; a strain of Humicola, such as a strain of Humicola insolens, and/or a strain of Chrysosporium, such as a strain of Chrysosporium lucknowense. In a preferred embodiment the cellulolytic enzyme is derived from a strain of Trichoderma reesei.

[0560] The cellulolytic enzyme composition may further comprise one or more of the following polypeptides, such as enzymes: AA9 polypeptide (GH61 polypeptide) having cellulolytic enhancing activity, beta-glucosidase, xylanase, beta-xylosidase, CBH I, CBH II, or a mixture of two, three, four, five or six thereof.

[0561] The further polypeptide(s) (e.g., AA9 polypeptide) and/or enzyme(s) (e.g., beta-glucosidase, xylanase, beta-xylosidase, CBH I and/or CBH II may be foreign to the cellulolytic enzyme composition producing organism (e.g., Trichoderma reesei).

[0562] In an embodiment, the cellulolytic enzyme composition comprises an AA9 polypeptide having cellulolytic enhancing activity and a beta-glucosidase.

[0563] In another embodiment, the cellulolytic enzyme composition comprises an AA9 polypeptide having cellulolytic enhancing activity, a beta-glucosidase, and a CBH I.

[0564] In another embodiment, the cellulolytic enzyme composition comprises an AA9 polypeptide having cellulolytic enhancing activity, a beta-glucosidase, a CBH I and a CBH II.

[0565] Other enzymes, such as endoglucanases, may also be comprised in the cellulolytic enzyme composition.

[0566] As mentioned above, the cellulolytic enzyme composition may comprise a number of difference polypeptides, including enzymes.

[0567] In one embodiment, the cellulolytic enzyme composition is a Trichoderma reesei cellulolytic enzyme composition, further comprising Thermoascus aurantiacus AA9 (GH61A) polypeptide having cellulolytic enhancing activity (e.g., WO2005/074656), and Aspergillus oryzae beta-glucosidase fusion protein (e.g., one disclosed in WO2008/057637, in particular shown as SEQ ID NOs: 59 and 60 therein).

[0568] In another embodiment, the cellulolytic enzyme composition is a Trichoderma reesei cellulolytic enzyme composition, further comprising Thermoascus aurantiacus AA9 (GH61A) polypeptide having cellulolytic enhancing activity (e.g., SEQ ID NO: 2 in WO2005/074656), and Aspergillus fumigatus beta-glucosidase (e.g., SEQ ID NO: 2 of WO2005/047499).

[0569] In another embodiment, the cellulolytic enzyme composition is a Trichoderma reesei cellulolytic enzyme composition, further comprising Penicillium emersonii AA9 (GH61A) polypeptide having cellulolytic enhancing activity, in particular the one disclosed in WO2011/041397, and Aspergillus fumigatus beta-glucosidase (e.g., SEQ ID NO: 2 of WO2005/047499).

[0570] In another embodiment, the cellulolytic enzyme composition is a Trichoderma reesei cellulolytic enzyme composition, further comprising Penicillium emersonii AA9 (GH61A) polypeptide having cellulolytic enhancing activity, in particular the one disclosed in WO2011/041397, and Aspergillus fumigatus beta-glucosidase (e.g., SEQ ID NO: 2 of WO2005/047499) or a variant disclosed in WO2012/044915 (hereby incorporated by reference), in particular one comprising one or more such as all of the following substitutions: F100D, S283G, N456E, F512Y.

[0571] In an embodiment, the cellulolytic enzyme composition is a Trichoderma reesei cellulolytic composition, further comprising an AA9 (GH61A) polypeptide having cellulolytic enhancing activity, in particular the one derived from a strain of Penicillium emersonii (e.g., SEQ ID NO: 2 in WO2011/041397), Aspergillus fumigatus beta-glucosidase (e.g., SEQ ID NO: 2 in WO2005/047499) variant with one or more, in particular all of the following substitutions: F100D, S283G, N456E, F512Y and disclosed in WO2012/044915; Aspergillus fumigatus Cel7A CBH1, e.g., the one disclosed as SEQ ID NO: 6 in WO2011/057140 and Aspergillus fumigatus CBH II, e.g., the one disclosed as SEQ ID NO: 18 in WO2011/057140.

[0572] In one embodiment, the cellulolytic enzyme composition is a Trichoderma reesei, cellulolytic enzyme composition, further comprising a hemicellulase or hemicellulolytic enzyme composition, such as an Aspergillus fumigatus xylanase and Aspergillus fumigatus beta-xylosidase.

[0573] In one embodiment, the cellulolytic enzyme composition also comprises a xylanase (e.g., derived from a strain of the genus Aspergillus, in particular Aspergillus aculeatus or Aspergillus fumigatus; or a strain of the genus Talaromyces, in particular Talaromyces leycettanus) and/or a beta-xylosidase (e.g., derived from Aspergillus, in particular Aspergillus fumigatus, or a strain of Talaromyces, in particular Talaromyces emersonii).

[0574] In an embodiment, the cellulolytic enzyme composition is a Trichoderma reesei cellulolytic enzyme composition, further comprising Thermoascus aurantiacus AA9 (GH61A) polypeptide having cellulolytic enhancing activity (e.g., WO2005/074656), Aspergillus oryzae beta-glucosidase fusion protein (e.g., one disclosed in WO2008/057637, in particular as SEQ ID NOs: 59 and 60), and Aspergillus aculeatus xylanase (e.g., Xyl II in WO94/21785).

[0575] In another embodiment, the cellulolytic enzyme composition comprises a Trichoderma reesei cellulolytic preparation, further comprising Thermoascus aurantiacus GH61A polypeptide having cellulolytic enhancing activity (e.g., SEQ ID NO: 2 in WO2005/074656), Aspergillus fumigatus beta-glucosidase (e.g., SEQ ID NO: 2 of WO2005/047499) and Aspergillus aculeatus xylanase (Xyl II disclosed in WO94/21785).

[0576] In another embodiment, the cellulolytic enzyme composition comprises a Trichoderma reesei cellulolytic enzyme composition, further comprising Thermoascus aurantiacus AA9 (GH61A) polypeptide having cellulolytic enhancing activity (e.g., SEQ ID NO: 2 in WO2005/074656), Aspergillus fumigatus beta-glucosidase (e.g., SEQ ID NO: 2 of WO2005/047499) and Aspergillus aculeatus xylanase (e.g., Xyl II disclosed in WO94/21785).

[0577] In another embodiment, the cellulolytic enzyme composition is a Trichoderma reesei cellulolytic enzyme composition, further comprising Penicillium emersonii AA9 (GH61A) polypeptide having cellulolytic enhancing activity, in particular the one disclosed in WO2011/041397, Aspergillus fumigatus beta-glucosidase (e.g., SEQ ID NO: 2 of WO2005/047499) and Aspergillus fumigatus xylanase (e.g., Xyl III in WO2006/078256).

[0578] In another embodiment, the cellulolytic enzyme composition comprises a Trichoderma reesei cellulolytic enzyme composition, further comprising Penicillium emersonii AA9 (GH61A) polypeptide having cellulolytic enhancing activity, in particular the one disclosed in WO2011/041397, Aspergillus fumigatus beta-glucosidase (e.g., SEQ ID NO: 2 of WO2005/047499), Aspergillus fumigatus xylanase (e.g., Xyl III in WO2006/078256), and CBH I from Aspergillus fumigatus, in particular Cel7A CBH1 disclosed as SEQ ID NO: 2 in WO2011/057140.

[0579] In another embodiment, the cellulolytic enzyme composition is a Trichoderma reesei cellulolytic enzyme composition, further comprising Penicillium emersonii AA9 (GH61A) polypeptide having cellulolytic enhancing activity, in particular the one disclosed in WO2011/041397, Aspergillus fumigatus beta-glucosidase (e.g., SEQ ID NO: 2 of WO2005/047499), Aspergillus fumigatus xylanase (e.g., Xyl III in WO2006/078256), CBH I from Aspergillus fumigatus, in particular Cel7A CBH1 disclosed as SEQ ID NO: 2 in WO2011/057140, and CBH II derived from Aspergillus fumigatus in particular the one disclosed as SEQ ID NO: 4 in WO2013/028928.

[0580] In another embodiment, the cellulolytic enzyme composition is a Trichoderma reesei cellulolytic enzyme composition, further comprising Penicillium emersonii AA9 (GH61A) polypeptide having cellulolytic enhancing activity, in particular the one disclosed in WO2011/041397, Aspergillus fumigatus beta-glucosidase (e.g., SEQ ID NO: 2 of WO2005/047499) or variant thereof with one or more, in particular all, of the following substitutions: F100D, S283G, N456E, F512Y; Aspergillus fumigatus xylanase (e.g., Xyl III in WO2006/078256), CBH I from Aspergillus fumigatus, in particular Cel7A CBH I disclosed as SEQ ID NO: 2 in WO2011/057140, and CBH II derived from Aspergillus fumigatus, in particular the one disclosed in WO2013/028928.

[0581] In another embodiment, the cellulolytic enzyme composition is a Trichoderma reesei cellulolytic enzyme composition comprising the CBH I (GENSEQP Accession No. AZY49536 (WO2012/103293); a CBH II (GENSEQP Accession No. AZY49446 (WO2012/103288); a beta-glucosidase variant (GENSEQP Accession No. AZU67153 (WO2012/44915)), in particular with one or more, in particular all, of the following substitutions: F100D, S283G, N456E, F512Y; and AA9 (GH61 polypeptide) (GENSEQP Accession No. BAL61510 (WO2013/028912)).

[0582] In another embodiment, the cellulolytic enzyme composition is a Trichoderma reesei cellulolytic enzyme composition comprising a CBH I (GENSEQP Accession No. AZY49536 (WO2012/103293)); a CBH II (GENSEQP Accession No. AZY49446 (WO2012/103288); a GH10 xylanase (GENSEQP Accession No. BAK46118 (WO2013/019827)); and a beta-xylosidase (GENSEQP Accession No. AZI04896 (WO2011/057140)).

[0583] In another embodiment, the cellulolytic enzyme composition is a Trichoderma reesei cellulolytic enzyme composition comprising a CBH I (GENSEQP Accession No. AZY49536 (WO2012/103293)); a CBH II (GENSEQP Accession No. AZY49446 (WO2012/103288)); and an AA9 (GH61 polypeptide; GENSEQP Accession No. BAL61510 (WO2013/028912)).

[0584] In another embodiment, the cellulolytic enzyme composition is a Trichoderma reesei cellulolytic enzyme composition comprising a CBH I (GENSEQP Accession No. AZY49536 (WO2012/103293)); a CBH II (GENSEQP Accession No. AZY49446 (WO2012/103288)), an AA9 (GH61 polypeptide; GENSEQP Accession No. BAL61510 (WO2013/028912)), and a catalase (GENSEQP Accession No. BAC11005 (WO2012/130120)).

[0585] In an embodiment, the cellulolytic enzyme composition is a Trichoderma reesei cellulolytic enzyme composition comprising a CBH I (GENSEQP Accession No. AZY49446 (WO2012/103288); a CBH II (GENSEQP Accession No. AZY49446 (WO2012/103288)), a beta-glucosidase variant (GENSEQP Accession No. AZU67153 (WO2012/44915)), with one or more, in particular all, of the following substitutions: F100D, S283G, N456E, F512Y; an AA9 (GH61 polypeptide; GENSEQP Accession No. BAL61510 (WO2013/028912)), a GH10 xylanase (GENSEQP Accession No. BAK46118 (WO2013/019827)), and a beta-xylosidase (GENSEQP Accession No. AZI04896 (WO2011/057140)).

[0586] In an embodiment, the cellulolytic composition is a Trichoderma reesei cellulolytic enzyme preparation comprising an EG I (Swissprot Accession No. P07981), EG II (EMBL Accession No. M19373), CBH I (supra); CBH II (supra); beta-glucosidase variant (supra) with the following substitutions: F100D, S283G, N456E, F512Y; an AA9 (GH61 polypeptide; supra), GH10 xylanase (supra); and beta-xylosidase (supra).

[0587] All cellulolytic enzyme compositions disclosed in WO2013/028928 are also contemplated and hereby incorporated by reference.

[0588] The cellulolytic enzyme composition comprises or may further comprise one or more (several) proteins selected from the group consisting of a cellulase, a AA9 (i.e., GH61) polypeptide having cellulolytic enhancing activity, a hemicellulase, an expansin, an esterase, a laccase, a ligninolytic enzyme, a pectinase, a peroxidase, a protease, and a swollenin.

[0589] In one embodiment, the cellulolytic enzyme composition is a commercial cellulolytic enzyme composition. Examples of commercial cellulolytic enzyme compositions suitable for use in a process of the invention include: CELLIC® CTec (Novozymes A/S), CELLIC® CTec2 (Novozymes A/S), CELLIC® CTec3 (Novozymes A/S), CELLUCLAST™ (Novozymes A/S), SPEZYME™ CP (Genencor Int.), ACCELLERASE™ 1000, ACCELLERASE 1500, ACCELLERASE™ TRIO (DuPont), FILTRASE® NL (DSM); METHAPLUS® S/L 100 (DSM), ROHAMENT™ 7069 W (Röhm GmbH), or ALTERNAFUEL® CMAX3™ (Dyadic International, Inc.). The cellulolytic enzyme composition may be added in an amount effective from about 0.001 to about 5.0 wt. % of solids, e.g., about 0.025 to about 4.0 wt. % of solids or about 0.005 to about 2.0 wt. % of solids.

[0590] Additional enzymes, and compositions thereof can be found in WO2011/153516 and WO2016/045569 (the contents of which are incorporated herein).

[0591] Additional polynucleotides encoding suitable cellulolytic enzymes may be obtained from microorganisms of any genus, including those readily available within the UniProtKB database (www.uniprot.org).

[0592] The cellulolytic enzyme coding sequences can also be used to design nucleic acid probes to identify and clone DNA encoding cellulolytic enzymes from strains of different genera or species, as described supra.

[0593] The polynucleotides encoding cellulolytic enzymes may also be identified and obtained from other sources including microorganisms isolated from nature (e.g., soil, composts, water, etc.) or DNA samples obtained directly from natural materials (e.g., soil, composts, water, etc,) as described supra.

[0594] Techniques used to isolate or clone polynucleotides encoding cellulolytic enzymes are described supra.

[0595] In one embodiment, the cellulolytic enzyme has at least 60%, e.g., at least 65%, at least 70%, at least 75%, at least 80%, at least 85%, at least 90%, at least 91%, at least 92%, at least 93%, at least 94%, at least 95%, at least 96%, at least 97%, at least 98%, at least 99%, or 100% sequence identity to any cellulolytic enzyme described or referenced herein (e.g., any endoglucanase, cellobiohydrolase, or beta-glucosidase). In one aspect, the cellulolytic enzyme sequence differs by no more than ten amino acids, e.g., by no more than five amino acids, by no more than four amino acids, by no more than three amino acids, by no more than two amino acids, or by one amino acid from any cellulolytic enzyme described or referenced herein. In one embodiment, the cellulolytic enzyme comprises or consists of the amino acid sequence of any cellulolytic enzyme described or referenced herein, allelic variant, or a fragment thereof having cellulolytic enzyme activity. In one embodiment, the cellulolytic enzyme has an amino acid substitution, deletion, and/or insertion of one or more (e.g., two, several) amino acids. In some embodiments, the total number of amino acid substitutions, deletions and/or insertions is not more than 10, e.g., not more than 9, 8, 7, 6, 5, 4, 3, 2, or 1.

[0596] In some embodiments, the cellulolytic enzyme has at least 20%, e.g., at least 40%, at least 50%, at least 60%, at least 70%, at least 80%, at least 90%, at least 95%, at least 96%, at least 97%, at least 98%, at least 99%, or 100% of the cellulolytic enzyme activity of any cellulolytic enzyme described or referenced herein (e.g., any endoglucanase, cellobiohydrolase, or beta-glucosidase) under the same conditions.

[0597] In one embodiment, the cellulolytic enzyme coding sequence hybridizes under at least low stringency conditions, e.g., medium stringency conditions, medium-high stringency conditions, high stringency conditions, or very high stringency conditions with the full-length complementary strand of the coding sequence from any cellulolytic enzyme described or referenced herein (e.g., any endoglucanase, cellobiohydrolase, or beta-glucosidase). In one embodiment, the cellulolytic enzyme coding sequence has at least 65%, e.g., at least 70%, at least 75%, at least 80%, at least 85%, at least 85%, at least 90%, at least 91%, at least 92%, at least 93%, at least 94%, at least 95%, at least 96%, at least 97%, at least 98%, at least 99%, or 100% sequence identity with the coding sequence from any cellulolytic enzyme described or referenced herein.

[0598] In one embodiment, the polynucleotide encoding the cellulolytic enzyme comprises the coding sequence of any cellulolytic enzyme described or referenced herein (e.g., any endoglucanase, cellobiohydrolase, or beta-glucosidase). In one embodiment, the polynucleotide encoding the cellulolytic enzyme comprises a subsequence of the coding sequence from any cellulolytic enzyme described or referenced herein, wherein the subsequence encodes a polypeptide having cellulolytic enzyme activity. In one embodiment, the number of nucleotides residues in the subsequence is at least 75%, e.g., at least 80%, 85%, 90%, or 95% of the number of the referenced coding sequence.

[0599] The cellulolytic enzyme can also include fused polypeptides or cleavable fusion polypeptides, as described supra.

### Xylose Metabolism

[0600] In one aspect, the fermenting organism (e.g., yeast cell) further comprises a heterologous polynucleotide encoding a xylose isomerase (X). The xylose isomerase may be any xylose isomerase that is suitable for the host cells and the methods described herein, such as a naturally occurring xylose isomerase or a variant thereof that retains xylose isomerase activity. In one embodiment, the xylose isomerase is present in the cytosol of the host cells.

[0601] In some embodiments, the fermenting organism comprising a heterologous polynucleotide encoding a xylose isomerase has an increased level of xylose isomerase activity compared to the host cells without the heterologous polynucleotide encoding the xylose isomerase, when cultivated under the same conditions. In some embodiments, the fermenting organisms have an increased level of xylose isomerase activity of at least 5%, e.g., at least 10%, at least 15%, at least 20%, at least 25%, at least 50%, at least 100%, at least 150%, at least 200%, at least 300%, or at 500% compared to the host cells without the heterologous polynucleotide encoding the xylose isomerase, when cultivated under the same conditions.

[0602] Exemplary xylose isomerases that can be used with the recombinant host cells and methods of use described herein include, but are not limited to, XIs from the fungus Piromyces sp. (WO2003/062430) or other sources (Madhavan et al., 2009, App/Microbiol Biotechnol. 82(6), 1067-1078) have been expressed in S. cerevisiae host cells. Still other XIs suitable for expression in yeast have been described in US2012/0184020 (an XI from Ruminococcus flavefaciens), WO2011/078262 (several XIs from Reticulitermes speratus and Mastotermes darwiniensis) and WO2012/009272 (constructs and fungal cells containing an XI from Abiotrophia defectiva). U.S. Pat. No. 8,586,336 describes a S. cerevisiae host cell expressing an XI obtained by bovine rumen fluid.

[0603] Additional polynucleotides encoding suitable xylose isomerases may be obtained from microorganisms of any genus, including those readily available within the UniProtKB database (www.uniprot.org). In one embodiment, the xylose isomerases is a bacterial, a yeast, or a filamentous fungal xylose isomerase, e.g., obtained from any of the microorganisms described or referenced herein, as described supra.

[0604] The xylose isomerase coding sequences can also be used to design nucleic acid probes to identify and clone DNA encoding xylose isomerases from strains of different genera or species, as described supra.

[0605] The polynucleotides encoding xylose isomerases may also be identified and obtained from other sources including microorganisms isolated from nature (e.g., soil, composts, water, etc.) or DNA samples obtained directly from natural materials (e.g., soil, composts, water, etc,) as described supra.

[0606] Techniques used to isolate or clone polynucleotides encoding xylose isomerases are described supra.

[0607] In one embodiment, the xylose isomerase has at least 60%, e.g., at least 65%, at least 70%, at least 75%, at least 80%, at least 85%, at least 90%, at least 91%, at least 92%, at least 93%, at least 94%, at least 95%, at least 96%, at least 97%, at least 98%, at least 99%, or 100% sequence identity to any xylose isomerase described or referenced herein. In one aspect, the xylose isomerase sequence differs by no more than ten amino acids, e.g., by no more than five amino acids, by no more than four amino acids, by no more than three amino acids, by no more than two amino acids, or by one amino acid from any xylose isomerase described or referenced herein. In one embodiment, the xylose isomerase comprises or consists of the amino acid sequence of any xylose isomerase described or referenced herein, allelic variant, or a fragment thereof having xylose isomerase activity. In one embodiment, the xylose isomerase has an amino acid substitution, deletion, and/or insertion of one or more (e.g., two, several) amino acids. In some embodiments, the total number of amino acid substitutions, deletions and/or insertions is not more than 10, e.g., not more than 9, 8, 7, 6, 5, 4, 3, 2, or 1.

[0608] In some embodiments, the xylose isomerase has at least 20%, e.g., at least 40%, at least 50%, at least 60%, at least 70%, at least 80%, at least 90%, at least 95%, at least 96%, at least 97%, at least 98%, at least 99%, or 100% of the xylose isomerase activity of any xylose isomerase described or referenced herein under the same conditions.

[0609] In one embodiment, the xylose isomerase coding sequence hybridizes under at least low stringency conditions, e.g., medium stringency conditions, medium-high stringency conditions, high stringency conditions, or very high stringency conditions with the full-length complementary strand of the coding sequence from any xylose isomerase described or referenced herein. In one embodiment, the xylose isomerase coding sequence has at least 65%, e.g., at least 70%, at least 75%, at least 80%, at least 85%, at least 85%, at least 90%, at least 91%, at least 92%, at least 93%, at least 94%, at least 95%, at least 96%, at least 97%, at least 98%, at least 99%, or 100% sequence identity with the coding sequence from any xylose isomerase described or referenced herein.

[0610] In one embodiment, the heterologous polynucleotide encoding the xylose isomerase comprises the coding sequence of any xylose isomerase described or referenced herein. In one embodiment, the heterologous polynucleotide encoding the xylose isomerase comprises a subsequence of the coding sequence from any xylose isomerase described or referenced herein, wherein the subsequence encodes a polypeptide having xylose isomerase activity. In one embodiment, the number of nucleotides residues in the subsequence is at least 75%, e.g., at least 80%, 85%, 90%, or 95% of the number of the referenced coding sequence.

[0611] The xylose isomerases can also include fused polypeptides or cleavable fusion polypeptides, as described supra.

[0612] In one aspect, the fermenting organism (e.g., yeast cell) further comprises a heterologous polynucleotide encoding a xylulokinase (XK). A xylulokinase, as used herein, provides enzymatic activity for converting D-xylulose to xylulose 5-phosphate. The xylulokinase may be any xylulokinase that is suitable for the host cells and the methods described herein, such as a naturally occurring xylulokinase or a variant thereof that retains xylulokinase activity. In one embodiment, the xylulokinase is present in the cytosol of the host cells.

[0613] In some embodiments, the fermenting organisms comprising a heterologous polynucleotide encoding a xylulokinase have an increased level of xylulokinase activity compared to the host cells without the heterologous polynucleotide encoding the xylulokinase, when cultivated under the same conditions. In some embodiments, the host cells have an increased level of xylose isomerase activity of at least 5%, e.g., at least 10%, at least 15%, at least 20%, at least 25%, at least 50%, at least 100%, at least 150%, at least 200%, at least 300%, or at 500% compared to the host cells without the heterologous polynucleotide encoding the xylulokinase, when cultivated under the same conditions.

[0614] Exemplary xylulokinases that can be used with the fermenting organisms and methods of use described herein include, but are not limited to, a Saccharomyces cerevisiae xylulokinase (e.g., the xylulokinase described as SEQ ID NO: 75 of WO2018/222990).

[0615] Additional polynucleotides encoding suitable xylulokinases may be obtained from microorganisms of any genus, including those readily available within the UniProtKB database (www.uniprot.org). In one embodiment, the xylulokinases is a bacterial, a yeast, or a filamentous fungal xylulokinase, e.g., obtained from any of the microorganisms described or referenced herein, as described supra.

[0616] The xylulokinase coding sequences can also be used to design nucleic acid probes to identify and clone DNA encoding xylulokinases from strains of different genera or species, as described supra.

[0617] The polynucleotides encoding xylulokinases may also be identified and obtained from other sources including microorganisms isolated from nature (e.g., soil, composts, water, etc.) or DNA samples obtained directly from natural materials (e.g., soil, composts, water, etc,) as described supra.

[0618] Techniques used to isolate or clone polynucleotides encoding xylulokinases are described supra.

[0619] In one embodiment, the xylulokinase has at least 60%, e.g., at least 65%, at least 70%, at least 75%, at least 80%, at least 85%, at least 90%, at least 91%, at least 92%, at least 93%, at least 94%, at least 95%, at least 96%, at least 97%, at least 98%, at least 99%, or 100% sequence identity to any xylulokinase described or referenced herein. In one embodiment, the xylulokinase sequence differs by no more than ten amino acids, e.g., by no more than five amino acids, by no more than four amino acids, by no more than three amino acids, by no more than two amino acids, or by one amino acid from any xylulokinase described or referenced herein. In one embodiment, the xylulokinase comprises or consists of the amino acid sequence of any xylulokinase described or referenced herein, allelic variant, or a fragment thereof having xylulokinase activity. In one embodiment, the xylulokinase has an amino acid substitution, deletion, and/or insertion of one or more (e.g., two, several) amino acids. In some embodiments, the total number of amino acid substitutions, deletions and/or insertions is not more than 10, e.g., not more than 9, 8, 7, 6, 5, 4, 3, 2, or 1.

[0620] In some embodiments, the xylulokinase has at least 20%, e.g., at least 40%, at least 50%, at least 60%, at least 70%, at least 80%, at least 90%, at least 95%, at least 96%, at least 97%, at least 98%, at least 99%, or 100% of the xylulokinase activity of any xylulokinase described or referenced herein under the same conditions.

[0621] In one embodiment, the xylulokinase coding sequence hybridizes under at least low stringency conditions, e.g., medium stringency conditions, medium-high stringency conditions, high stringency conditions, or very high stringency conditions with the full-length complementary strand of the coding sequence from any xylulokinase described or referenced herein. In one embodiment, the xylulokinase coding sequence has at least 65%, e.g., at least 70%, at least 75%, at least 80%, at least 85%, at least 85%, at least 90%, at least 91%, at least 92%, at least 93%, at least 94%, at least 95%, at least 96%, at least 97%, at least 98%, at least 99%, or 100% sequence identity with the coding sequence from any xylulokinase described or referenced herein.

[0622] In one embodiment, the heterologous polynucleotide encoding the xylulokinase comprises the coding sequence of any xylulokinase described or referenced herein. In one embodiment, the heterologous polynucleotide encoding the xylulokinase comprises a subsequence of the coding sequence from any xylulokinase described or referenced herein, wherein the subsequence encodes a polypeptide having xylulokinase activity. In one embodiment, the number of nucleotides residues in the subsequence is at least 75%, e.g., at least 80%, 85%, 90%, or 95% of the number of the referenced coding sequence.

[0623] The xylulokinases can also include fused polypeptides or cleavable fusion polypeptides, as described supra.

[0624] In one aspect, the fermenting organism (e.g., yeast cell) further comprises a heterologous polynucleotide encoding a ribulose 5 phosphate 3-epimerase (RPE1). A ribulose 5 phosphate 3-epimerase, as used herein, provides enzymatic activity for converting L-ribulose 5-phosphate to L-xylulose 5-phosphate (EC 5.1.3.22). The RPE1 may be any RPE1 that is suitable for the host cells and the methods described herein, such as a naturally occurring RPE1 or a variant thereof that retains RPE1 activity. In one embodiment, the RPE1 is present in the cytosol of the host cells.

[0625] In one embodiment, the fermenting organism (e.g., yeast cell) comprises a heterologous polynucleotide encoding a ribulose 5 phosphate 3-epimerase (RPE1), wherein the RPE1 is Saccharomyces cerevisiae RPE1, or an RPE1 having at least 60%, e.g., at least 65%, 70%, 75%, 80%, 85%, 90%, 95%, 97%, 98%, 99%, or 100% sequence identity to a Saccharomyces cerevisiae RPE1.

[0626] In one aspect, the fermenting organism (e.g., yeast cell) further comprises a heterologous polynucleotide encoding a ribulose 5 phosphate isomerase (RKI1). A ribulose 5 phosphate isomerase, as used herein, provides enzymatic activity for converting ribose-5-phophate to ribulose 5-phosphate. The RKI1 may be any RKI1 that is suitable for the host cells and the methods described herein, such as a naturally occurring RKI1 or a variant thereof that retains RKI1 activity. In one embodiment, the RKI1 is present in the cytosol of the host cells.

[0627] In one embodiment, the fermenting organism comprises a heterologous polynucleotide encoding a ribulose 5 phosphate isomerase (RKI1), wherein the RKI1 is a Saccharomyces cerevisiae RKI1, or an RKI1 having at least 60%, e.g., at least 65%, 70%, 75%, 80%, 85%, 90%, 95%, 97%, 98%, 99%, or 100% sequence identity to a Saccharomyces cerevisiae RKI1.

[0628] In one aspect, the fermenting organism (e.g., yeast cell) further comprises a heterologous polynucleotide encoding a transketolase (TKL1). The TKL1 may be any TKL1 that is suitable for the host cells and the methods described herein, such as a naturally occurring TKL1 or a variant thereof that retains TKL1 activity. In one embodiment, the TKL1 is present in the cytosol of the host cells.

[0629] In one embodiment, the fermenting organism comprises a heterologous polynucleotide encoding a transketolase (TKL1), wherein the TKL1 is a Saccharomyces cerevisiae TKL1, or a TKL1 having at least 60%, e.g., at least 65%, 70%, 75%, 80%, 85%, 90%, 95%, 97%, 98%, 99%, or 100% sequence identity to a Saccharomyces cerevisiae TKL1.

[0630] In one aspect, the fermenting organism (e.g., yeast cell) further comprises a heterologous polynucleotide encoding a transaldolase (TAL1). The TAL1 may be any TAL1 that is suitable for the host cells and the methods described herein, such as a naturally occurring TAL1 or a variant thereof that retains TAL1 activity. In one embodiment, the TAL1 is present in the cytosol of the host cells.

[0631] In one embodiment, the fermenting organism comprises a heterologous polynucleotide encoding a transketolase (TAL1), wherein the TAL1 is a Saccharomyces cerevisiae TAL1, or a TAL1 having at least 60%, e.g., at least 65%, 70%, 75%, 80%, 85%, 90%, 95%, 97%, 98%, 99%, or 100% sequence identity to a Saccharomyces cerevisiae TAL1.

### Fermentation Products

[0632] A fermentation product can be any substance derived from the fermentation. The fermentation product can be, without limitation, an alcohol (e.g., arabinitol, n-butanol, isobutanol, ethanol, glycerol, methanol, ethylene glycol, 1,3-propanediol [propylene glycol], butanediol, glycerin, sorbitol, and xylitol); an alkane (e.g., pentane, hexane, heptane, octane, nonane, decane, undecane, and dodecane), a cycloalkane (e.g., cyclopentane, cyclohexane, cycloheptane, and cyclooctane), an alkene (e.g., pentene, hexene, heptene, and octene); an amino acid (e.g., aspartic acid, glutamic acid, glycine, lysine, serine, and threonine); a gas (e.g., methane, hydrogen (H₂), carbon dioxide (CO₂), and carbon monoxide (CO)); isoprene; a ketone (e.g., acetone); an organic acid (e.g., acetic acid, acetonic acid, adipic acid, ascorbic acid, citric acid, 2,5-diketo-D-gluconic acid, formic acid, fumaric acid, glucaric acid, gluconic acid, glucuronic acid, glutaric acid, 3-hydroxypropionic acid, itaconic acid, lactic acid, malic acid, malonic acid, oxalic acid, oxaloacetic acid, propionic acid, succinic acid, and xylonic acid); and polyketide.

[0633] In one embodiment, the fermentation product is an alcohol. The term “alcohol” encompasses a substance that contains one or more hydroxyl moieties. The alcohol can be, but is not limited to, n-butanol, isobutanol, ethanol, methanol, arabinitol, butanediol, ethylene glycol, glycerin, glycerol, 1,3-propanediol, sorbitol, xylitol. See, for example, Gong et al., 1999, Ethanol production from renewable resources, in Advances in Biochemical Engineering/Biotechnology, Scheper, T., ed., Springer-Verlag Berlin Heidelberg, Germany, 65: 207-241; Silveira and Jonas, 2002, Appl. Microbiol. Biotechnol. 59: 400-408; Nigam and Singh, 1995, Process Biochemistry 30(2): 117-124; Ezeji et al., 2003, World Journal of Microbiology and Biotechnology 19(6): 595-603. In one embodiment, the fermentation product is ethanol.

[0634] In another embodiment, the fermentation product is an alkane. The alkane may be an unbranched or a branched alkane. The alkane can be, but is not limited to, pentane, hexane, heptane, octane, nonane, decane, undecane, or dodecane.

[0635] In another embodiment, the fermentation product is a cycloalkane. The cycloalkane can be, but is not limited to, cyclopentane, cyclohexane, cycloheptane, or cyclooctane.

[0636] In another aspect, the fermentation product is an alkene. The alkene may be an unbranched or a branched alkene. The alkene can be, but is not limited to, pentene, hexene, heptene, or octene.

[0637] In another aspect, the fermentation product is an amino acid. The organic acid can be, but is not limited to, aspartic acid, glutamic acid, glycine, lysine, serine, or threonine. See, for example, Richard and Margaritis, 2004, Biotechnology and Bioengineering 87(4): 501-515.

[0638] In another embodiment, the fermentation product is a gas. The gas can be, but is not limited to, methane, H₂, CO₂, or CO. See, for example, Kataoka et al., 1997, Water Science and Technology 36(6-7): 41-47; and Gunaseelan, 1997, Biomass and Bioenergy 13(1-2): 83-114.

[0639] In another embodiment, the fermentation product is isoprene.

[0640] In another embodiment, the fermentation product is a ketone. The term “ketone” encompasses a substance that contains one or more ketone moieties. The ketone can be, but is not limited to, acetone.

[0641] In another embodiment, the fermentation product is an organic acid. The organic acid can be, but is not limited to, acetic acid, acetonic acid, adipic acid, ascorbic acid, citric acid, 2,5-diketo-D-gluconic acid, formic acid, fumaric acid, glucaric acid, gluconic acid, glucuronic acid, glutaric acid, 3-hydroxypropionic acid, itaconic acid, lactic acid, malic acid, malonic acid, oxalic acid, propionic acid, succinic acid, or xylonic acid. See, for example, Chen and Lee, 1997, Appl. Biochem. Biotechnol. 63-65: 435-448.

[0642] In another embodiment, the fermentation product is polyketide.

### Recovery

[0643] The fermentation product, e.g., ethanol, can optionally be recovered from the fermentation medium using any method known in the art including, but not limited to, chromatography, electrophoretic procedures, differential solubility, distillation, or extraction. For example, alcohol is separated from the fermented cellulosic material and purified by conventional methods of distillation. Ethanol with a purity of up to about 96 vol. % can be obtained, which can be used as, for example, fuel ethanol, drinking ethanol, i.e., potable neutral spirits, or industrial ethanol.

[0644] In some embodiments of the methods, the fermentation product after being recovered is substantially pure. With respect to the methods herein, “substantially pure” intends a recovered preparation that contains no more than 15% impurity, wherein impurity intends compounds other than the fermentation product (e.g., ethanol). In one variation, a substantially pure preparation is provided wherein the preparation contains no more than 25% impurity, or no more than 20% impurity, or no more than 10% impurity, or no more than 5% impurity, or no more than 3% impurity, or no more than 1% impurity, or no more than 0.5% impurity.

[0645] Suitable assays to test for the production of ethanol and contaminants, and sugar consumption can be performed using methods known in the art. For example, ethanol product, as well as other organic compounds, can be analyzed by methods such as HPLC (High Performance Liquid Chromatography), GC-MS (Gas Chromatography Mass Spectroscopy) and LC-MS (Liquid Chromatography-Mass Spectroscopy) or other suitable analytical methods using routine procedures well known in the art. The release of ethanol in the fermentation broth can also be tested with the culture supernatant. Byproducts and residual sugar in the fermentation medium (e.g., glucose or xylose) can be quantified by HPLC using, for example, a refractive index detector for glucose and alcohols, and a UV detector for organic acids (Lin et al., Biotechnol. Bioeng. 90:775-779 (2005)), or using other suitable assay and detection methods well known in the art.

[0646] The invention may further be described in the following numbered paragraphs:

Paragraph [1]. A method of producing a fermentation product from a starch-containing or cellulosic-containing material comprising:
(a) saccharifying the starch-containing or cellulosic-containing material; and
(b) fermenting the saccharified material of step (a) with a fermenting organism;
[0647] wherein the fermenting organism comprises a genetic modification that increases or decreases expression of a transporter, or regulator thereof.
   Paragraph [2]. The method of paragraph [1], wherein the fermenting organism has increased or decreased expression (e.g., by at least 5%, e.g., at least 10%, at least 15%, at least 20%, at least 25%, at least 50%, at least 100%, at least 150%, at least 200%, at least 300%, or at 500%) of a transporter, or regulator thereof when compared to Saccharomyces cerevisiae strain Ethanol Red® (ER; deposited under Accession No. V14/007039 at National Measurement Institute, Victoria, Australia) under the same conditions.
   Paragraph [3]. The method of paragraph [1] or [2], wherein the fermenting organism requires less supplemental nitrogen (e.g., urea, ammonia, ammonium hydroxide) during fermentation to maintain the same yield of fermentation product, when compared to an otherwise identical fermenting organism lacking the genetic modification that increases or decreases expression of a transporter, or regulator thereof.
   Paragraph [4]. The method of any one of paragraphs [1]-[3], wherein the transporter is an Amino Acid/Auxin Permease (AAAP), such as any one of the AAAPs shown in Table 2 (e.g., any one of SEQ ID NOs: 163, 164 and 432-541).
   Paragraph [5]. The method of any one of paragraphs [1]-[4], wherein the fermenting organism comprises a heterologous polynucleotide encoding an Amino Acid/Auxin Permease (AAAP).
   Paragraph [6]. The method of paragraph [4] or [5], wherein the Amino Acid/Auxin Permease (AAAP) comprises one or more motifs selected from:

Motif A:
(SEQ ID NO: 542)
L-[I, L]-T-T-D-[I, V]-L-G-P;
Motif B:
(SEQ ID NO: 543)
[V, I]-[F, Y]-[A, S]-[F, Y, W]-G-G;
Motif C:
(SEQ ID NO: 544)
E-[M, L]-[A, K, R]-[H, K, N, R]-P-X-[D, E]-F;
and
Motif D:
(SEQ ID NO: 545)
A-X-X-L-Y-[G, S]-N-[I, V]-[A, G, S]-[I, L, V]-
K-X-X-Y.

Paragraph [7]. The method of paragraph [4] or [5], wherein the Amino Acid/Auxin Permease (AAAP) comprises Motif A: L-[I,L]-T-T-D-[I,V]-L-G-P (SEQ ID NO: 542).
Paragraph [8]. The method of paragraph [4] or [5], wherein Motif A is Motif A2: L-I-T-T-D-I-L-G-P (SEQ ID NO: 546).
Paragraph [9]. The method of paragraph [4] or [5], wherein the Amino Acid/Auxin Permease (AAAP) comprises Motif D: A-X-X-L-Y-[G,S]-N-[I,V]-[A,G,S]-[I,L,V]-K-X-X-Y (SEQ ID NO: 545).
Paragraph [10]. The method of paragraph [4] or [5], wherein the Amino Acid/Auxin Permease (AAAP) comprises Motif B: [V,I]-[F,Y]-[A,S]-[F,Y,W]-G-G (SEQ ID NO: 543) and Motif C: E-[M,L]-[A,K, R]-[H,K,N, R]-P-X-[D,E]-F (SEQ ID NO: 544).
Paragraph [11]. The method of any one of paragraphs [1]-[10], wherein the Amino Acid/Auxin Permease (AAAP) has at least 60%, e.g., at least 65%, 70%, 75%, 80%, 85%, 90%, 95%, 97%, 98%, 99%, or 100% sequence identity to the amino acid sequence of any one of the AAAPs shown in Table 2 (e.g., any one of SEQ ID NOs: 163, 164 and 432-541).
Paragraph [12]. The method of any one of paragraphs [1]-[11], wherein the Amino Acid/Auxin Permease (AAAP) differs by no more than ten amino acids, e.g., by no more than five amino acids, by no more than four amino acids, by no more than three amino acids, by no more than two amino acids, or by one amino acid from any one of the transporters shown in Table 2 (e.g., any one of SEQ ID NOs: 163, 164 and 432-541).
Paragraph [13]. The method of any one of paragraphs [1]-[12], wherein the Amino Acid/Auxin Permease (AAAP) comprises or consists of the amino acid sequence of any one of the transporters shown in Table 2 (e.g., any one of SEQ ID NOs: 163, 164 and 432-541).
Paragraph [14]. The method of any one of paragraphs [1]-[3], wherein the fermenting organism comprises a heterologous polynucleotide encoding a transporter having at least 60%, e.g., at least 65%, 70%, 75%, 80%, 85%, 90%, 95%, 97%, 98%, 99%, or 100% sequence identity to the amino acid sequence of any one of the transporters shown in Table 1 (e.g., any one of SEQ ID NOs: 86-162 and 165-170).
Paragraph [15]. The method of any one of paragraphs [1]-[3], wherein the fermenting organism comprises a heterologous polynucleotide encoding a transporter that differs by no more than ten amino acids, e.g., by no more than five amino acids, by no more than four amino acids, by no more than three amino acids, by no more than two amino acids, or by one amino acid from any one of the transporters shown in Table 1 (e.g., any one of SEQ ID NOs 86-162 and 165-170).
Paragraph [16]. The method of any one of paragraphs [1]-[3], wherein the fermenting organism comprises a heterologous polynucleotide encoding a transporter comprising or consisting of the amino acid sequence of any one of the transporters shown in Table 1 (e.g., any one of SEQ ID NOs: 86-162 and 165-170).
Paragraph [17]. The method of any one of paragraphs [1]-[16], wherein the fermenting organism comprises a disruption to an endogenous transporter gene, such as any one of the transporter genes shown in Table 1 (e.g., any one of SEQ ID NOs: 1-77 and 80-85) and/or any one of the Amino Acid/Auxin Permease (AAAP) genes shown in Table 2 (e.g., any one of SEQ ID NOs: 78, 79 and 322-431).
Paragraph [18]. The method of paragraph [17], wherein the disrupted endogenous transporter gene is inactivated.
Paragraph [19]. The method of paragraph [17] or [18], wherein the coding sequence of the endogenous transporter gene has at least 60%, e.g., at least 65%, at least 70%, at least 75%, at least 80%, at least 85%, at least 90%, at least 95%, at least 96%, at least 97%, at least 98%, at least 99%, or 100% sequence identity to the coding sequence of any one of the transporters shown in Table 1 (e.g., any one of SEQ ID NOs: 1-77 and 80-85) or any one of the Amino Acid/Auxin Permease (AAAP) genes shown in Table 2 (e.g., any one of SEQ ID NOs: 78, 79 and 322-431).
Paragraph [20]. The method of any one of paragraphs [17]-[19], wherein the endogenous transporter gene encodes a transporter having at least 60%, e.g., at least 65%, at least 70%, at least 75%, at least 80%, at least 85%, at least 90%, at least 95%, at least 96%, at least 97%, at least 98%, at least 99%, or 100% sequence identity to the any one of the transporters shown in Table 1 (e.g., any one of SEQ ID NOs: 86-162 and 165-170) or any one of the Amino Acid/Auxin Permeases (AAAPs) shown in Table 2 (e.g., any one of SEQ ID NOs: 163, 164 and 432-541).
Paragraph [21]. The method of any one of paragraphs [1]-[20], wherein the fermenting organism comprises a genetic modification that increases or decreases expression of a regulator, such as any one of the regulators shown in Table 3 (e.g., any one of SEQ ID NOs: 231-290).
Paragraph [22]. The method of any one of paragraphs [1]-[21], wherein the fermenting organism comprises a heterologous polynucleotide encoding a regulator, wherein the regulator has at least 60%, e.g., at least 65%, 70%, 75%, 80%, 85%, 90%, 95%, 97%, 98%, 99%, or 100% sequence identity to the amino acid sequence of any one of the regulators shown in Table 3 (e.g., any one of SEQ ID NOs: 231-290).
Paragraph [23]. The method of any one of paragraphs [1]-[22], wherein the fermenting organism comprises a heterologous polynucleotide encoding regulator, wherein the regulator differs by no more than ten amino acids, e.g., by no more than five amino acids, by no more than four amino acids, by no more than three amino acids, by no more than two amino acids, or by one amino acid from any one of the regulators shown in Table 3 (e.g., any one of SEQ ID NOs: 231-290).
Paragraph [24]. The method of any one of paragraphs [1]-[23], wherein the fermenting organism comprises a heterologous polynucleotide encoding a regulator, wherein the regulator has an amino acid sequence comprising or consisting of the amino acid sequence of any one of the regulators shown in Table 3 (e.g., any one of SEQ ID NOs: 231-290).
Paragraph [25]. The method of any one of paragraphs [1]-[24], wherein the fermenting organism comprises a disruption to an endogenous regulator gene, such as any one of the regulator genes shown in Table 3 (e.g., any one of SEQ ID NOs: 171-230).
Paragraph [26]. The method of paragraph [25], wherein the disrupted endogenous regulator gene is inactivated.
Paragraph [27]. The method of paragraph [25] or [26], wherein the coding sequence of the endogenous regulator gene has at least 60%, e.g., at least 65%, at least 70%, at least 75%, at least 80%, at least 85%, at least 90%, at least 95%, at least 96%, at least 97%, at least 98%, at least 99%, or 100% sequence identity to the coding sequence of any one of the regulator genes shown in Table 3 (e.g., any one of SEQ ID NOs: 171-230).
Paragraph [28]. The method of any one of paragraphs [25]-[27], wherein the endogenous regulator gene encodes a regulator having at least 60%, e.g., at least 65%, at least 70%, at least 75%, at least 80%, at least 85%, at least 90%, at least 95%, at least 96%, at least 97%, at least 98%, at least 99%, or 100% sequence identity to the any one of the regulators shown in Table 3 (e.g., any one of SEQ ID NOs: 231-290).
Paragraph [29]. The method of any one of paragraphs [1]-[28], comprising liquefying the starch-containing material at a temperature above the initial gelatinization temperature in the presence of an alpha-amylase prior to saccharification.
Paragraph [30]. The method of paragraph [29], comprising adding a protease in liquefaction.
Paragraph [31]. The method of paragraph [30], wherein the protease is a serine protease, e.g., an S8 protease.
Paragraph [32]. The method of paragraph [30] or [31], wherein the protease is a bacterial protease, particularly a protease derived form Pyrococcus, Palaeococcus, or Thermococcus, more particularly Pyrococcus furiosus, Palaeococcus ferrophilus, Thermococcus litoralis, Thermococcus thioreducens.
Paragraph [33]. The method of any one of paragraphs [30]-[32], wherein the protease is selected from the group consisting of SEQ ID NO: 291, SEQ ID NO: 292, SEQ ID NO: 293, SEQ ID NO: 294, and SEQ ID NO: 295, or a variant of any one of SEQ ID NO: 291, SEQ ID NO: 292, SEQ ID NO: 293, SEQ ID NO: 294, and SEQ ID NO: 295 having at least at least 60%, e.g., at least 65%, at least 70%, at least 75%, at least 80%, at least 85%, at least 90%, at least 91%, at least 92%, at least 93%, at least 94%, at least 95%, at least 96%, at least 97%, at least 98%, or at least 99% sequence identity thereto.
Paragraph [34]. The method of any one of paragraphs [1]-[33], wherein fermentation and saccharification are performed simultaneously in a simultaneous saccharification and fermentation (SSF).
Paragraph [35]. The method of any one of paragraphs [1]-[33], wherein fermentation and saccharification are performed sequentially (SHF).
Paragraph [36]. The method of any one of paragraphs [1]-[35], comprising recovering the fermentation product from the from the fermentation.
Paragraph [37]. The method of paragraph [36], wherein recovering the fermentation product from the from the fermentation comprises distillation.
Paragraph [38]. The method of any one of paragraphs [1]-[37], wherein the fermentation product is ethanol.
Paragraph [39]. The method of paragraph [38], wherein the ethanol yield is more than 1.0%, e.g., more than 2.0%, more than 2.5%, more than 3.0%, more than 3.5%, more than 4.0%, more than 4.5%, more than 5.0%, more than 5.5%, more than 6.0%, more than 6.5%, more than 7.0%, more than 7.5%, more than 8.0%, more than 8.5%, more than 9.0%, more than 9.5%, or more than 10.0%, greater than Saccharomyces cerevisiae strain Ethanol Red® (ER; deposited under Accession No. V14/007039 at National Measurement Institute, Victoria, Australia) under the same conditions (e.g., under conditions described herein, such as after 53 hours fermentation).
Paragraph [40]. The method of paragraph [38] or [39], wherein the ethanol yield is more than 1.0%, e.g., more than 2.0%, more than 2.5%, more than 3.0%, more than 3.5%, more than 4.0%, more than 4.5%, more than 5.0%, more than 5.5%, more than 6.0%, more than 6.5%, more than 7.0%, more than 7.5%, more than 8.0%, more than 8.5%, more than 9.0%, more than 9.5%, or more than 10.0%, greater when compared to an otherwise identical fermenting organism lacking the genetic modification that increases or decreases expression of a regulator under the same conditions (e.g., under conditions described herein, such as after 53 hours fermentation).
Paragraph [41]. The method of any one of paragraphs [1]-[40], wherein saccharification of step (a) occurs on a starch-containing material, and wherein the starch-containing material is either gelatinized or ungelatinized starch.
Paragraph [42]. The method of any one of paragraphs [1]-[41], wherein the fermenting organism comprises a heterologous polynucleotide encoding a glucoamylase.
Paragraph [43]. The method of paragraph [42], wherein the glucoamylase is a Pycnoporus glycoamylase (e.g. a Pycnoporus sanguineus glucoamylase described herein), a Gloeophyllum glucoamylase (e.g. a Gloeophyllum sepiarium or Gloeophyllum trabeum glucoamylase described herein), or a Saccharomycopsis glucoamylase (e.g., a Saccharomycopsis fibuligera glucoamylase described herein).
Paragraph [44]. The method of any one of paragraphs [1]-[43], wherein the fermenting organism comprises a heterologous polynucleotide encoding an alpha-amylase.
Paragraph [45]. The method of paragraph [44], wherein the alpha-amylase is a Bacillus alpha-amylase (e.g., a Bacillus stearothermophilus, Bacillus amyloliquefaciens, or Bacillus licheniformis alpha-amylase described herein), or a Debaryomyces alpha-amylase (e.g., a Debaryomyces occidentalis alpha-amylase described herein).
Paragraph [46]. The method of any one of paragraphs [1]-[45], wherein the fermenting organism comprises a heterologous polynucleotide encoding a protease.
Paragraph [47]. The method of paragraph [46], wherein the protease is a Meripilus giganteus, Trametes versicolor, Dichomitus squalens, Polyporus arcularius, Lenzites betulinus, Ganoderma lucidum, Neolentinus lepideus, or Bacillus sp. 19138 protease (e.g., a protease having any one of SEQ ID NOs: 9-73 of WO2018/222990).
Paragraph [48]. The method of any one of paragraphs [1]-[40], wherein saccharification of step (a) occurs on a cellulosic-containing material, and wherein the cellulosic-containing material is pretreated.
Paragraph [49]. The method of paragraph [48], wherein the pretreatment is a dilute acid pretreatment.
Paragraph [50]. The method of any one of paragraphs [1]-[40], wherein saccharification occurs on a cellulosic-containing material, and wherein the enzyme composition comprises one or more enzymes selected from a cellulase, an AA9 polypeptide, a hemicellulase, a CIP, an esterase, an expansin, a ligninolytic enzyme, an oxidoreductase, a pectinase, a protease, and a swollenin.
Paragraph [51]. The method of paragraph [50], wherein the cellulase is one or more enzymes selected from an endoglucanase, a cellobiohydrolase, and a beta-glucosidase.
Paragraph [52]. The method of paragraph [50], wherein the hemicellulase is one or more enzymes selected a xylanase, an acetylxylan esterase, a feruloyl esterase, an arabinofuranosidase, a xylosidase, and a glucuronidase.
Paragraph [53]. The method of any one of paragraphs [1]-[52], wherein the fermenting organism is a Saccharomyces, Rhodotorula, Schizosaccharomyces, Kluyveromyces, Pichia, Issatchenkia, Hansenula, Rhodosporidium, Candida, Torulaspora, Zygosaccharomyces, Yarrowia, Lipomyces, Cryptococcus, or Dekkera sp. cell.
Paragraph [54]. The method of any one of paragraphs [1]-[53], wherein the fermenting organism is a I. orientalis, C. lambica, S. bulderi or a S. cerevisiae cell.
Paragraph [55]. The method of any one of paragraphs [1]-[54], wherein the fermenting organism is a Saccharomyces cerevisiae cell.
Paragraph [56]. A yeast cell comprising a genetic modification that increases or decreases expression of a transporter, or regulator thereof.
Paragraph [57]. The yeast cell of paragraph [56], wherein the cell has increased or decreased expression (e.g., by at least 5%, e.g., at least 10%, at least 15%, at least 20%, at least 25%, at least 50%, at least 100%, at least 150%, at least 200%, at least 300%, or at 500%) of a transporter, or regulator thereof when compared to Saccharomyces cerevisiae strain Ethanol Red® (ER; deposited under Accession No. V14/007039 at National Measurement Institute, Victoria, Australia) under the same conditions.
Paragraph [58]. The yeast cell of paragraph [56] or [57], wherein the cell is capable of maintaining the same yield of a fermentation product with less supplemental nitrogen (e.g., urea, ammonia, ammonium hydroxide) during fermentation, when compared to an otherwise identical fermenting organism lacking the genetic modification that increases or decreases expression of a transporter, or regulator thereof.
Paragraph [59]. The yeast cell of any one of paragraphs [56]-[58], wherein the transporter is an Amino Acid/Auxin Permease (AAAP), such as any one of the AAAPs shown in Table 2 (e.g., any one of SEQ ID NOs: 163, 164 and 432-541).
Paragraph [60]. The yeast cell of any one of paragraphs [56]-[59], wherein the cell organism comprises a heterologous polynucleotide encoding an Amino Acid/Auxin Permease (AAAP).
Paragraph [61]. The yeast cell of paragraph [59] or [60], wherein the Amino Acid/Auxin Permease (AAAP) comprises one or more motifs selected from:

Motif A:
(SEQ ID NO: 542)
L-[I, L]-T-T-D-[I, V]-L-G-P;
Motif B:
(SEQ ID NO: 543)
[V, I]-[F, Y]-[A, S]-[F, Y, W]-G-G;
Motif C:
(SEQ ID NO: 544)
E-[M, L]-[A, K, R]-[H, K, N, R]-P-X-[D, E]-F;
and
Motif D:
(SEQ ID NO: 545)
A-X-X-L-Y-[G, S]-N-[I, V]-[A, G, S]-[I, L, V]-
K-X-X-Y.

Paragraph [62]. The yeast cell of paragraph [59] or [60], wherein the Amino Acid/Auxin Permease (AAAP) comprises Motif A: L-[I,L]-T-T-D-[I,V]-L-G-P (SEQ ID NO: 542).
Paragraph [63]. The yeast cell of paragraph [59] or [60], wherein Motif A is Motif A2: L-I-T-T-D-I-L-G-P (SEQ ID NO: 546).
Paragraph [64]. The yeast cell of paragraph [59] or [60], wherein the Amino Acid/Auxin Permease (AAAP) comprises Motif D: A-X-X-L-Y-[G,S]-N-[I,V]-[A,G,S]-[I,L,V]-K-X-X-Y (SEQ ID NO: 545).
Paragraph [65]. The yeast cell of paragraph [59] or [60], wherein the Amino Acid/Auxin Permease (AAAP) comprises Motif B: [V,I]-[F,Y]-[A,S]-[F,Y,W]-G-G (SEQ ID NO: 543) and Motif C: E-[M, L]-[A, K, R]-[H, K, N, R]-P-X-[D, E]-F (SEQ ID NO: 544).
Paragraph [66]. The yeast cell of any one of paragraphs [59]-[65], wherein the Amino Acid/Auxin Permease (AAAP) has at least 60%, e.g., at least 65%, 70%, 75%, 80%, 85%, 90%, 95%, 97%, 98%, 99%, or 100% sequence identity to the amino acid sequence of any one of the AAAPs shown in Table 2 (e.g., any one of SEQ ID NOs: 163, 164 and 432-541).
Paragraph [67]. The yeast cell of any one of paragraphs [59]-[66], wherein the Amino Acid/Auxin Permease (AAAP) differs by no more than ten amino acids, e.g., by no more than five amino acids, by no more than four amino acids, by no more than three amino acids, by no more than two amino acids, or by one amino acid from any one of the transporters shown in Table 2 (e.g., any one of SEQ ID NOs: 163, 164 and 432-541).
Paragraph [68]. The yeast cell of any one of paragraphs [59]-[67], wherein the Amino Acid/Auxin Permease (AAAP) comprises or consists of the amino acid sequence of any one of the transporters shown in Table 2 (e.g., any one of SEQ ID NOs: 163, 164 and 432-541).
Paragraph [69]. The yeast cell of any one of paragraphs [56]-[68], wherein the cell comprises a heterologous polynucleotide encoding a transporter having at least 60%, e.g., at least 65%, 70%, 75%, 80%, 85%, 90%, 95%, 97%, 98%, 99%, or 100% sequence identity to the amino acid sequence of any one of the transporters shown in Table 1 (e.g., any one of SEQ ID NOs: 86-162 and 165-170).
Paragraph [70]. The yeast cell of any one of paragraphs [56]-[69], wherein the cell comprises a heterologous polynucleotide encoding a transporter that differs by no more than ten amino acids, e.g., by no more than five amino acids, by no more than four amino acids, by no more than three amino acids, by no more than two amino acids, or by one amino acid from any one of the transporters shown in Table 1 (e.g., any one of SEQ ID NOs: 86-162 and 165-170).
Paragraph [71]. The yeast cell of any one of paragraphs [56]-[70], wherein the cell comprises a heterologous polynucleotide encoding a transporter comprising or consisting of the amino acid sequence of any one of the transporters shown in Table 1 (e.g., any one of SEQ ID NOs: 86-162 and 165-170).
Paragraph [72]. The yeast cell of any one of paragraphs [56]-[71], wherein the cell comprises a disruption to an endogenous transporter gene, such as any one of the transporter genes shown in Table 1 (e.g., any one of SEQ ID NOs: 1-77 and 80-85) and/or any one of the Amino Acid/Auxin Permease (AAAP) genes shown in Table 2 (e.g., any one of SEQ ID NOs: 78, 79 and 322-431).
Paragraph [73]. The yeast cell of paragraph [72], wherein the disrupted endogenous transporter gene is inactivated.
Paragraph [74]. The yeast cell of paragraph [72] or [73], wherein the coding sequence of the endogenous transporter gene has at least 60%, e.g., at least 65%, at least 70%, at least 75%, at least 80%, at least 85%, at least 90%, at least 95%, at least 96%, at least 97%, at least 98%, at least 99%, or 100% sequence identity to the coding sequence of any one of the transporters shown in Table 1 (e.g., any one of SEQ ID NOs: 1-77 and 80-85) or any one of the Amino Acid/Auxin Permease (AAAP) genes shown in Table 2 (e.g., any one of SEQ ID NOs: 78, 79 and 322-431).
Paragraph [75]. The yeast cell of any one of paragraphs [72]-[74], wherein the endogenous transporter gene encodes a transporter having at least 60%, e.g., at least 65%, at least 70%, at least 75%, at least 80%, at least 85%, at least 90%, at least 95%, at least 96%, at least 97%, at least 98%, at least 99%, or 100% sequence identity to the any one of the transporters shown in Table 1 (e.g., any one of SEQ ID NOs: 86-162 and 165-170) or any one of the Amino Acid/Auxin Permeases (AAAPs) shown in Table 2 (e.g., any one of SEQ ID NOs: 163, 164 and 432-541).
Paragraph [76]. The yeast cell of any one of paragraphs [56]-[75], wherein the cell comprises a genetic modification that increases or decreases expression of a regulator, such as any one of the regulators shown in Table 3 (e.g., any one of SEQ ID NOs: 231-290).
Paragraph [77]. The yeast cell of any one of paragraphs [56]-[76], wherein the cell comprises a heterologous polynucleotide encoding a regulator, wherein the regulator has at least 60%, e.g., at least 65%, 70%, 75%, 80%, 85%, 90%, 95%, 97%, 98%, 99%, or 100% sequence identity to the amino acid sequence of any one of the regulators shown in Table 3 (e.g., any one of SEQ ID NOs: 231-290).
Paragraph [78]. The yeast cell of any one of paragraphs [56]-[77], wherein the cell comprises a heterologous polynucleotide encoding regulator, wherein the regulator differs by no more than ten amino acids, e.g., by no more than five amino acids, by no more than four amino acids, by no more than three amino acids, by no more than two amino acids, or by one amino acid from any one of the regulators shown in Table 3 (e.g., any one of SEQ ID NOs: 231-290). Paragraph [79]. The yeast cell of any one of paragraphs [56]-[78], wherein the cell comprises a heterologous polynucleotide encoding a regulator, wherein the regulator has an amino acid sequence comprising or consisting of the amino acid sequence of any one of the regulators shown in Table 3 (e.g., any one of SEQ ID NOs: 231-290).
Paragraph [80]. The yeast cell of any one of paragraphs [56]-[79], wherein the cell comprises a disruption to an endogenous regulator gene, wheren the regulator gene is any one of the regulator genes shown in Table 3 (e.g., any one of SEQ ID NOs: 171-230).
Paragraph [81]. The yeast cell of paragraph [80], wherein the disrupted endogenous regulator gene is inactivated.
Paragraph [82]. The yeast cell of paragraph [80] or [81], wherein the coding sequence of the endogenous regulator gene has at least 60%, e.g., at least 65%, at least 70%, at least 75%, at least 80%, at least 85%, at least 90%, at least 95%, at least 96%, at least 97%, at least 98%, at least 99%, or 100% sequence identity to the coding sequence of any one of the regulator genes shown in Table 3 (e.g., any one of SEQ ID NOs: 171-230).
Paragraph [83]. The yeast cell of any one of paragraphs [80]-[82], wherein the endogenous gene encodes a regulator having at least 60%, e.g., at least 65%, at least 70%, at least 75%, at least 80%, at least 85%, at least 90%, at least 95%, at least 96%, at least 97%, at least 98%, at least 99%, or 100% sequence identity to the any one of the regulators shown in Table 3 (e.g., any one of SEQ ID NOs: 231-290).
Paragraph [84]. The yeast cell of any one of paragraphs [56]-[83], wherein the cell comprises a heterologous polynucleotide encoding a glucoamylase.
Paragraph [85]. The yeast cell of paragraph [84], wherein the glucoamylase is a Pycnoporus glycoamylase (e.g. a Pycnoporus sanguineus glucoamylase described herein), a Gloeophyllum glucoamylase (e.g. a Gloeophyllum sepiarium or Gloeophyllum trabeum glucoamylase described herein), or a Saccharomycopsis glucoamylase (e.g., a Saccharomycopsis fibuligera glucoamylase, such as SEQ ID NO: 102 or 103 of WO2018/222990).
Paragraph [86]. The yeast cell of any one of paragraphs [56]-[85], wherein the cell comprises a heterologous polynucleotide encoding an alpha-amylase.
Paragraph [87]. The yeast cell of paragraph [86], wherein the alpha-amylase is a Bacillus alpha-amylase (e.g., a Bacillus stearothermophilus, Bacillus amyloliquefaciens, or Bacillus licheniformis alpha-amylase described herein), or a Debaryomyces alpha-amylase (e.g., a Debaryomyces occidentalis alpha-amylase described herein).
Paragraph [88]. The yeast cell of any one of paragraphs [56]-[87], wherein the cell comprises a heterologous polynucleotide encoding protease.
Paragraph [89]. The yeast cell of paragraph [88], wherein the protease is a Meripilus giganteus, Trametes versicolor, Dichomitus squalens, Polyporus arcularius, Lenzites betulinus, Ganoderma lucidum, Neolentinus lepideus, or Bacillus sp. 19138 protease (e.g., a protease having the sequence of any one of SEQ ID NOs: 9-73 of WO2018/222990).
Paragraph [90]. The yeast cell of any one of paragraphs [56]-[89], wherein the cell is a Saccharomyces, Rhodotorula, Schizosaccharomyces, Kluyveromyces, Pichia Issatchenkia, Hansenula, Rhodosporidium, Candida, Torulaspora, Zygosaccharomyces, Yarrowia, Lipomyces, Cryptococcus, or Dekkera sp. cell.
Paragraph [91]. The yeast cell of any one of paragraphs [56]-[90], wherein the cell is a I. orientalis, C. lambica, S. bulderi or a S. cerevisiae cell.
Paragraph [92]. The yeast cell of any one of paragraphs [56]-[91], wherein the cell is a Saccharomyces cerevisiae cell.
Paragraph [93]. A Saccharomyces cerevisiae yeast cell comprising:
(1) a heterologous polynucleotide encoding an Amino Acid/Auxin Permease (AAAP), and
(2) a heterologous polynucleotide encoding a glucoamylase, alpha-amylase, or protease.
Paragraph [94]. The yeast cell of paragraph [93], wherein the Amino Acid/Auxin Permease (AAAP) comprises one or more motifs selected from:

Motif A:
(SEQ ID NO: 542)
L-[I, L]-T-T-D-[I, V]-L-G-P;
Motif B:
(SEQ ID NO: 543)
[V, I]-[F, Y]-[A, S]-[F, Y, W]-G-G;
Motif C:
(SEQ ID NO: 544)
E-[M, L]-[A, K, R]-[H, K, N, R]-P-X-[D, E]-F;
and
Motif D:
(SEQ ID NO: 545)
A-X-X-L-Y-[G, S]-N-[I, V]-[A, G, S]-[I, L, V]-
K-X-X-Y.

Paragraph [95]. The yeast cell of paragraph [93], wherein the Amino Acid/Auxin Permease (AAAP) comprises Motif A: L-[I,L]-T-T-D-[I,V]-L-G-P (SEQ ID NO: 542).
Paragraph [96]. The yeast cell of paragraph [93], wherein Motif A is Motif A2: L-I-T-T-D-I-L-G-P (SEQ ID NO: 546).
Paragraph [97]. The yeast cell of paragraph [93], wherein the Amino Acid/Auxin Permease (AAAP) comprises Motif D: A-X-X-L-Y-[G,S]-N-[I,V]-[A,G,S]-[I,L,V]-K-X-X-Y (SEQ ID NO: 545).
Paragraph [98]. The yeast cell of paragraph [93], wherein the Amino Acid/Auxin Permease (AAAP) comprises Motif B: [V,I]-[F,Y]-[A,S]-[F,Y,W]-G-G (SEQ ID NO: 543) and Motif C: E-[M,L]-[A,K, R]-[H,K,N, R]-P-X-[D,E]-F (SEQ ID NO: 544).
Paragraph [99]. The yeast cell of any one of paragraphs [93]-[98], wherein the Amino Acid/Auxin Permease (AAAP) has at least 60%, e.g., at least 65%, 70%, 75%, 80%, 85%, 90%, 95%, 97%, 98%, 99%, or 100% sequence identity to the amino acid sequence of any one of the AAAPs shown in Table 2 (e.g., any one of SEQ ID NOs: 163, 164 and 432-541).
Paragraph [100]. The yeast cell of any one of paragraphs [93]-[99], wherein the Amino Acid/Auxin Permease (AAAP) differs by no more than ten amino acids, e.g., by no more than five amino acids, by no more than four amino acids, by no more than three amino acids, by no more than two amino acids, or by one amino acid from amino acid sequence of any one of the AAAPs shown in Table 2 (e.g., any one of SEQ ID NOs: 163, 164 and 432-541).
Paragraph [101]. The yeast cell of any one of paragraphs [93]-[100], wherein the Amino Acid/Auxin Permease (AAAP) comprises or consists of the amino acid sequence of any one of the AAAPs shown in Table 2 (e.g., any one of SEQ ID NOs: 163, 164 and 432-541).
Paragraph [102]. The yeast cell of any one of paragraphs [93]-[100], wherein the heterologous polynucleotide encoding the transporter is introduced into the cell using recombinant techniques.
Paragraph [103]. The yeast cell of any one of paragraphs [93]-[102], wherein the heterologous polynucleotide encoding the transporter is operably linked to a promoter that is foreign to the polynucleotide.
Paragraph [104]. The yeast cell of any one of paragraphs [93]-[100], wherein the heterologous polynucleotide encoding the transporter is introduced into the cell using non-recombinant breeding techniques.
Paragraph [105]. The yeast cell of any one of paragraphs [93]-[104], wherein the cell is capable of maintaining the same yield of a fermentation product with less supplemental nitrogen (e.g., urea, ammonia, ammonium hydroxide) during fermentation, when compared to an otherwise identical fermenting organism lacking the heterologous polynucleotide encoding the transporter.
Paragraph [106]. The yeast cell of any one of paragraphs [93]-[105], wheren the cell is capable of increased consumption of tripeptides or tetrapeptides under conditions described herein (e.g., decreased residual tripeptides or tetrapeptides in the fermentation medium after 29 hours of fermentation), when compared to an otherwise identical fermenting organism lacking the heterologous polynucleotide encoding the transporter.
Paragraph [107]. The yeast cell of any one of paragraphs [93]-[106], wherein the cell comprises a heterologous polynucleotide encoding a glucoamylase.
Paragraph [108]. The yeast cell of paragraph [107], wherein the heterologous polynucleotide encoding the glucoamylase is operably linked to a promoter that is foreign to the polynucleotide.
Paragraph [109]. The yeast cell of paragraph [107] or [108], wherein the glucoamylase is a Pycnoporus glycoamylase (e.g. a Pycnoporus sanguineus glucoamylase described herein), a Gloeophyllum glucoamylase (e.g. a Gloeophyllum sepiarium or Gloeophyllum trabeum glucoamylase described herein), or a Saccharomycopsis glucoamylase (e.g., a Saccharomycopsis fibuligera glucoamylase, such as SEQ ID NO: 102 or 103 of WO2018/222990).
Paragraph [110]. The yeast cell of any one of paragraphs [93]-[109], wherein the cell comprises a heterologous polynucleotide encoding an alpha-amylase.
Paragraph [111]. The yeast cell of paragraph [110], wherein the heterologous polynucleotide encoding the alpha-amylase is operably linked to a promoter that is foreign to the polynucleotide.
Paragraph [112]. The yeast cell of paragraph [110] or [111], wherein the alpha-amylase is a Bacillus alpha-amylase (e.g., a Bacillus stearothermophilus, Bacillus amyloliquefaciens, or Bacillus licheniformis alpha-amylase described herein), or a Debaryomyces alpha-amylase (e.g., a Debaryomyces occidentalis alpha-amylase described herein).
Paragraph [113]. The yeast cell of any one of paragraphs [93]-[109], wherein the cell comprises a heterologous polynucleotide encoding protease.
Paragraph [114]. The yeast cell of paragraph [113], wherein the heterologous polynucleotide encoding the protease is operably linked to a promoter that is foreign to the polynucleotide.
Paragraph [115]. The yeast cell of [113] or [114], wherein the protease is a Meripilus giganteus, Trametes versicolor, Dichomitus squalens, Polyporus arcularius, Lenzites betulinus, Ganoderma lucidum, Neolentinus lepideus, or Bacillus sp. 19138 protease (e.g., a protease having the sequence of any one of SEQ ID NOs: 9-73 of WO2018/222990).
Paragraph [116]. The yeast cell of any one of paragraphs [93]-[115], wherein the cell further comprises a heterologous polynucleotide encoding a transporter having at least 60%, e.g., at least 65%, 70%, 75%, 80%, 85%, 90%, 95%, 97%, 98%, 99%, or 100% sequence identity to the amino acid sequence of any one of the transporters of Table 1 (e.g., any one of SEQ ID NOs: 86-162 and 165-170).
Paragraph [117]. The yeast cell of any one of paragraphs [93]-[115], wherein the cell further comprises a heterologous polynucleotide encoding a transporter having at least 60%, e.g., at least 65%, 70%, 75%, 80%, 85%, 90%, 95%, 97%, 98%, 99%, or 100% sequence identity to the amino acid sequence of SEQ ID NO: 129, SEQ ID NO: 130 or SEQ ID NO: 161.
Paragraph [118]. The yeast cell of any one of paragraphs [93]-[117], wherein the cell comprises a disruption to an endogenous transporter gene, such as any one of the transporter genes shown in Table 1 (e.g., any one of SEQ ID NOs: 1-77 and 80-85) and/or any one of the Amino Acid/Auxin Permease (AAAP) genes shown in Table 2 (e.g., any one of SEQ ID NOs: 78, 79 and 322-431).
Paragraph [119]. The yeast cell of [118], wherein the disrupted endogenous transporter gene is inactivated.
Paragraph [120]. The yeast cell of [118] or [119], wherein the coding sequence of the endogenous transporter gene has at least 60%, e.g., at least 65%, at least 70%, at least 75%, at least 80%, at least 85%, at least 90%, at least 95%, at least 96%, at least 97%, at least 98%, at least 99%, or 100% sequence identity to the coding sequence of any one of the transporters shown in Table 1 (e.g., any one of SEQ ID NOs: 1-77 and 80-85) or any one of the Amino Acid/Auxin Permease (AAAP) genes shown in Table 2 (e.g., any one of SEQ ID NOs: 78, 79 and 322-431).
Paragraph [121]. The yeast cell of any one of paragraphs [118]-[120], wherein the endogenous transporter gene encodes a transporter having at least 60%, e.g., at least 65%, at least 70%, at least 75%, at least 80%, at least 85%, at least 90%, at least 95%, at least 96%, at least 97%, at least 98%, at least 99%, or 100% sequence identity to the any one of the transporters shown in Table 1 (e.g., any one of SEQ ID NOs: 86-162 and 165-170) or any one of the Amino Acid/Auxin Permeases (AAAPs) shown in Table 2 (e.g., any one of SEQ ID NOs: 163, 164 and 432-541).
Paragraph [122]. The yeast cell of any one of paragraphs [93]-[121], wherein the cell further comprises a heterologous polynucleotide encoding a regulator, wherein the regulator has at least 60%, e.g., at least 65%, 70%, 75%, 80%, 85%, 90%, 95%, 97%, 98%, 99%, or 100% sequence identity to the amino acid sequence of any one of the regulators shown in Table 3 (e.g., any one of SEQ ID NOs: 231-290).
Paragraph [123]. The yeast cell of any one of paragraphs [93]-[122], wherein the cell comprises a disruption to an endogenous regulator gene.
Paragraph [124]. The yeast cell of [123], wherein the disrupted endogenous regulator gene is inactivated.
Paragraph [125]. The yeast cell of [123] or [124], wherein the coding sequence of the endogenous regulator gene has at least 60%, e.g., at least 65%, at least 70%, at least 75%, at least 80%, at least 85%, at least 90%, at least 95%, at least 96%, at least 97%, at least 98%, at least 99%, or 100% sequence identity to the coding sequence of any one of the regulator genes shown in Table 3 (e.g., any one of SEQ ID NOs: 171-230).
Paragraph [126]. The yeast cell of any one of paragraphs [123]-[125], wherein the endogenous gene encodes a regulator having at least 60%, e.g., at least 65%, at least 70%, at least 75%, at least 80%, at least 85%, at least 90%, at least 95%, at least 96%, at least 97%, at least 98%, at least 99%, or 100% sequence identity to the any one of the regulators shown in Table 3 (e.g., any one of SEQ ID NOs: 231-290).
Paragraph [127]. The yeast cell of paragraph any one of paragraphs [93]-[126], wherein the cell is a recombinant cell.
Paragraph [128]. A Saccharomyces cerevisiae yeast cell comprising a heterologous polynucleotide encoding an Amino Acid/Auxin Permease (AAAP);
[0648] with the proviso that the yeast cell is other than:
[0649] Saccharomyces cerevisiae MBG4851 (deposited under Accession No. V14/004037 at National Measurement Institute, Victoria, Australia) or a derivative thereof,
[0650] Saccharomyces cerevisiae MBG4911 (deposited under Accession No. V15/001459 at National Measurement Institute, Victoria, Australia) or a derivative thereof,
[0651] Saccharomyces cerevisiae MBG4913 (deposited under Accession No. V15/001460 at National Measurement Institute, Victoria, Australia) or a derivative thereof,
[0652] Saccharomyces cerevisiae MBG4914 (deposited under Accession No. V15/001461 at National Measurement Institute, Victoria, Australia) or a derivative thereof,
[0653] Saccharomyces cerevisiae MBG4930 (deposited under Accession No. V15/004035 at National Measurement Institute, Victoria, Australia) or a derivative thereof,
[0654] Saccharomyces cerevisiae MBG4931 (deposited under Accession No. V15/004036 at National Measurement Institute, Victoria, Australia) or a derivative thereof,
[0655] Saccharomyces cerevisiae MBG4932 (deposited under Accession No. V15/004037 at National Measurement Institute, Victoria, Australia) or a derivative thereof.
   Paragraph [129]. The yeast cell of paragraph [128], wherein the Amino Acid/Auxin Permease (AAAP) comprises one or more motifs selected from:

Motif A:
(SEQ ID NO: 542)
L-[I, L]-T-T-D-[I, V]-L-G-P;
Motif B:
(SEQ ID NO: 543)
[V, I]-[F, Y]-[A, S]-[F, Y, W]-G-G;
Motif C:
(SEQ ID NO: 544)
E-[M, L]-[A, K, R]-[H, K, N, R]-P-X-[D, E]-F;
and
Motif D:
(SEQ ID NO: 545)
A-X-X-L-Y-[G, S]-N-[I, V]-[A, G, S]-[I, L, V]-
K-X-X-Y.

Paragraph [130]. The yeast cell of paragraph [128], wherein the Amino Acid/Auxin Permease (AAAP) comprises Motif A: L-[I,L]-T-T-D-[I,V]-L-G-P (SEQ ID NO: 542).
Paragraph [131]. The yeast cell of paragraph [128], wherein Motif A is Motif A2: L-I-T-T-D-I-L-G-P (SEQ ID NO: 546).
Paragraph [132]. The yeast cell of paragraph [128], wherein the Amino Acid/Auxin Permease (AAAP) comprises Motif D: A-X-X-L-Y-[G,S]-N-[I,V]-[A,G,S]-[I,L,V]-K-X-X-Y (SEQ ID NO: 545).
Paragraph [133]. The yeast cell of paragraph [128], wherein the Amino Acid/Auxin Permease (AAAP) comprises Motif B: [V,I]-[F,Y]-[A,S]-[F,Y,W]-G-G (SEQ ID NO: 543) and Motif C: E-[M,L]-[A,K,R]-[H,K,N,R]-P-X-[D,E]-F (SEQ ID NO: 544).
Paragraph [134]. The yeast cell of any one of paragraphs [128]-[133], wherein the Amino Acid/Auxin Permease (AAAP) has at least 60%, e.g., at least 65%, 70%, 75%, 80%, 85%, 90%, 95%, 97%, 98%, 99%, or 100% sequence identity to the amino acid sequence of any one of the AAAPs shown in Table 2 (e.g., any one of SEQ ID NOs: 163, 164 and 432-541).
Paragraph [135]. The yeast cell of any one of paragraphs [128]-[134], wherein the Amino Acid/Auxin Permease (AAAP) differs by no more than ten amino acids, e.g., by no more than five amino acids, by no more than four amino acids, by no more than three amino acids, by no more than two amino acids, or by one amino acid from any one of the transporters shown in Table 2 (e.g., any one of SEQ ID NOs: 163, 164 and 432-541).
Paragraph [136]. The yeast cell of any one of paragraphs [128]-[135], wherein the Amino Acid/Auxin Permease (AAAP) comprises or consists of the amino acid sequence of any one of the transporters shown in Table 2 (e.g., any one of SEQ ID NOs: 163, 164 and 432-541).
Paragraph [137]. The yeast cell of any one of paragraphs [128]-[136], wherein the heterologous polynucleotide encoding the transporter is introduced into the cell using recombinant techniques.
Paragraph [138]. The yeast cell of any one of paragraphs [128]-[137], wherein the heterologous polynucleotide encoding the transporter is operably linked to a promoter that is foreign to the polynucleotide.
Paragraph [139]. The yeast cell of any one of paragraphs [128]-[136], wherein the heterologous polynucleotide encoding the transporter is introduced into the cell using non-recombinant breeding techniques.
Paragraph [140]. The yeast cell of any one of paragraphs [128]-[139], wheren the cell is capable of maintaining the same yield of a fermentation product with less supplemental nitrogen (e.g., urea, ammonia, ammonium hydroxide) during fermentation, when compared to an otherwise identical fermenting organism lacking the heterologous polynucleotide encoding the transporter.
Paragraph [141]. The yeast cell of any one of paragraphs [128]-[140], wheren the cell is capable of increased consumption of tripeptides or tetrapeptides under conditions described herein (e.g., decreased residual tripeptides or tetrapeptides in the fermentation medium after 29 hours of fermentation), when compared to an otherwise identical fermenting organism lacking the heterologous polynucleotide encoding the transporter.
Paragraph [142]. The yeast cell of paragraph any one of paragraphs [128]-[141], wherein the cell further comprises a heterologous polynucleotide encoding a glucoamylase.
Paragraph [143]. The yeast cell of paragraph [142], wherein the heterologous polynucleotide encoding the glucoamylase is operably linked to a promoter that is foreign to the polynucleotide.
Paragraph [144]. The yeast cell of paragraph [142] or [143], wherein the glucoamylase is a Pycnoporus glycoamylase (e.g. a Pycnoporus sanguineus glucoamylase described herein), a Gloeophyllum glucoamylase (e.g. a Gloeophyllum sepiarium or Gloeophyllum trabeum glucoamylase described herein), or a Saccharomycopsis glucoamylase (e.g., a Saccharomycopsis fibuligera glucoamylase, such as SEQ ID NO: 102 or 103 of WO2018/222990).
Paragraph [145]. The yeast cell of any one of paragraphs [128]-[144], wherein the cell further comprises a heterologous polynucleotide encoding an alpha-amylase.
Paragraph [146]. The yeast cell of paragraph [145], wherein the heterologous polynucleotide encoding the alpha-amylase is operably linked to a promoter that is foreign to the polynucleotide.
Paragraph [147]. The yeast cell of paragraph [145] or [146], wherein the alpha-amylase is a Bacillus alpha-amylase (e.g., a Bacillus stearothermophilus, Bacillus amyloliquefaciens, or Bacillus licheniformis alpha-amylase described herein), or a Debaryomyces alpha-amylase (e.g., a Debaryomyces occidentalis alpha-amylase described herein).
Paragraph [148]. The yeast cell of paragraph any one of paragraphs [128]-[147], wherein the cell further comprises a heterologous polynucleotide encoding protease.
Paragraph [149]. The yeast cell of paragraph [148], wherein the heterologous polynucleotide encoding the protease is operably linked to a promoter that is foreign to the polynucleotide.
Paragraph [150]. The yeast cell of [148] or [149], wherein the protease is a Meripilus giganteus, Trametes versicolor, Dichomitus squalens, Polyporus arcularius, Lenzites betulinus, Ganoderma lucidum, Neolentinus lepideus, or Bacillus sp. 19138 protease (e.g., a protease having the sequence of any one of SEQ ID NOs: 9-73 of WO2018/222990).
Paragraph [151]. The yeast cell of any one of paragraphs [128]-[150], wherein the cell further comprises a heterologous polynucleotide encoding a transporter having at least 60%, e.g., at least 65%, 70%, 75%, 80%, 85%, 90%, 95%, 97%, 98%, 99%, or 100% sequence identity to the amino acid sequence of any one of the transporters of Table 1 (e.g., any one of SEQ ID NOs: 86-162 and 165-170).
Paragraph [152]. The yeast cell of any one of paragraphs [128]-[151], wherein the cell further comprises a heterologous polynucleotide encoding a transporter having at least 60%, e.g., at least 65%, 70%, 75%, 80%, 85%, 90%, 95%, 97%, 98%, 99%, or 100% sequence identity to the amino acid sequence of SEQ ID NO: 129, SEQ ID NO: 130 or SEQ ID NO: 161.
Paragraph [153]. The yeast cell of any one of paragraphs [128]-[152], wherein the cell comprises a disruption to an endogenous transporter gene, such as any one of the transporter genes shown in Table 1 (e.g., any one of SEQ ID NOs: 1-77 and 80-85) and/or any one of the Amino Acid/Auxin Permease (AAAP) genes shown in Table 2 (e.g., any one of SEQ ID NOs: 78, 79 and 322-431).
Paragraph [154]. The yeast cell of [153], wherein the disrupted endogenous transporter gene is inactivated.
Paragraph [155]. The yeast cell of [153] or [154], wherein the coding sequence of the endogenous transporter gene has at least 60%, e.g., at least 65%, at least 70%, at least 75%, at least 80%, at least 85%, at least 90%, at least 95%, at least 96%, at least 97%, at least 98%, at least 99%, or 100% sequence identity to the coding sequence of any one of the transporters shown in Table 1 (e.g., any one of SEQ ID NOs: 1-77 and 80-85) or any one of the Amino Acid/Auxin Permease (AAAP) genes shown in Table 2 (e.g., any one of SEQ ID NOs: 78, 79 and 322-431).
Paragraph [156]. The yeast cell of any one of paragraphs [153]-[155], wherein the endogenous transporter gene encodes a transporter having at least 60%, e.g., at least 65%, at least 70%, at least 75%, at least 80%, at least 85%, at least 90%, at least 95%, at least 96%, at least 97%, at least 98%, at least 99%, or 100% sequence identity to the any one of the transporters shown in Table 1 (e.g., any one of SEQ ID NOs: 86-162 and 165-170) or any one of the Amino Acid/Auxin Permeases (AAAPs) shown in Table 2 (e.g., any one of SEQ ID NOs: 163, 164 and 432-541).
Paragraph [157]. The yeast cell of any one of paragraphs [128]-[156], wherein the cell further comprises a heterologous polynucleotide encoding a regulator, wherein the regulator has at least 60%, e.g., at least 65%, 70%, 75%, 80%, 85%, 90%, 95%, 97%, 98%, 99%, or 100% sequence identity to the amino acid sequence of any one of the regulators shown in Table 3 (e.g., any one of SEQ ID NOs: 231-290).
Paragraph [158]. The yeast cell of any one of paragraphs [128]-[157], wherein the cell comprises a disruption to an endogenous regulator gene.
Paragraph [159]. The yeast cell of [158], wherein the disrupted endogenous regulator gene is inactivated.
Paragraph [160]. The yeast cell of [158] or [159], wherein the coding sequence of the endogenous regulator gene has at least 60%, e.g., at least 65%, at least 70%, at least 75%, at least 80%, at least 85%, at least 90%, at least 95%, at least 96%, at least 97%, at least 98%, at least 99%, or 100% sequence identity to the coding sequence of any one of the regulator genes shown in Table 3 (e.g., any one of SEQ ID NOs: 171-230).
Paragraph [161]. The yeast cell of any one of paragraphs [158]-[160], wherein the endogenous gene encodes a regulator having at least 60%, e.g., at least 65%, at least 70%, at least 75%, at least 80%, at least 85%, at least 90%, at least 95%, at least 96%, at least 97%, at least 98%, at least 99%, or 100% sequence identity to the any one of the regulators shown in Table 3 (e.g., any one of SEQ ID NOs: 231-290).
Paragraph [162]. The yeast cell of paragraph any one of paragraphs [128]-[161], wherein the cell is a recombinant cell.
Paragraph [163]. The yeast cell of paragraph any one of paragraphs [128]-[161], wherein the cell is non-recombinant cell.
Paragraph [164]. A yeast cell comprising a heterologous polynucleotide encoding an Amino Acid/Auxin Permease (AAAP), and wherein the yeast cell comprises a recombinant genetic modification that increases expression of the transporter.
Paragraph [165]. The yeast cell of paragraph [164], wherein the Amino Acid/Auxin Permease (AAAP) comprises one or more motifs selected from:

Motif A:
(SEQ ID NO: 542)
L-[I, L]-T-T-D-[I, V]-L-G-P;
Motif B:
(SEQ ID NO: 543)
[V, I]-[F, Y]-[A, S]-[F, Y, W]-G-G;
Motif C:
(SEQ ID NO: 544)
E-[M, L]-[A, K, R]-[H, K, N, R]-P-X-[D, E]-F;
and
Motif D:
(SEQ ID NO: 545)
A-X-X-L-Y-[G, S]-N-[I, V]-[A, G, S]-[I, L, V]-
K-X-X-Y.

Paragraph [166]. The yeast cell of paragraph [164], wherein the Amino Acid/Auxin Permease (AAAP) comprises Motif A: L-[I,L]-T-T-D-[I,V]-L-G-P (SEQ ID NO: 542).
Paragraph [167]. The yeast cell of paragraph [164], wherein Motif A is Motif A2: L-I-T-T-D-I-L-G-P (SEQ ID NO: 546).
Paragraph [168]. The yeast cell of paragraph [164], wherein the Amino Acid/Auxin Permease (AAAP) comprises Motif D: A-X-X-L-Y-[G,S]-N-[I,V]-[A,G,S]-[I,L,V]-K-X-X-Y (SEQ ID NO: 545).
Paragraph [169]. The yeast cell of paragraph [164], wherein the Amino Acid/Auxin Permease (AAAP) comprises Motif B: [V,I]-[F,Y]-[A,S]-[F,Y,W]-G-G (SEQ ID NO: 543) and Motif C: E-[M,L]-[A,K,R]-[H,K,N,R]-P-X-[D,E]-F (SEQ ID NO: 544).
Paragraph [170]. The yeast cell of any one of paragraphs [164]-[169], wheren the Amino Acid/Auxin Permease (AAAP) has at least 60%, e.g., at least 65%, 70%, 75%, 80%, 85%, 90%, 95%, 97%, 98%, 99%, or 100% sequence identity to the amino acid sequence of any one of the AAAPs shown in Table 2 (e.g., any one of SEQ ID NOs: 163, 164 and 432-541).
Paragraph [171]. The yeast cell of any one of paragraphs [164]-[170], wherein the Amino Acid/Auxin Permease (AAAP) differs by no more than ten amino acids, e.g., by no more than five amino acids, by no more than four amino acids, by no more than three amino acids, by no more than two amino acids, or by one amino acid from amino acid sequence of any one of the AAAPs shown in Table 2 (e.g., any one of SEQ ID NOs: 163, 164 and 432-541).
Paragraph [172]. The yeast cell of any one of paragraphs [164]-[171], wherein the Amino Acid/Auxin Permease (AAAP) comprises or consists of the amino acid sequence of any one of the AAAPs shown in Table 2 (e.g., any one of SEQ ID NOs: 163, 164 and 432-541).
Paragraph [173]. The yeast cell of any one of paragraphs [164]-[172], wherein the heterologous polynucleotide encoding the transporter is operably linked to a promoter that is foreign to the polynucleotide.
Paragraph [174]. The yeast cell of any one of paragraphs [164]-[173], wherein the cell comprises multiple copies of the heterologous polynucleotide encoding the transporter.
Paragraph [175]. The yeast cell of paragraph [174], wherein coding sequences of the multiple copies are identical.
Paragraph [176]. The yeast cell of paragraph [174], wherein coding sequences of the multiple copies are non-identical.
Paragraph [177]. The yeast cell of any one of paragraphs [164]-[176], wheren the cell is capable of maintaining the same yield of a fermentation product with less supplemental nitrogen (e.g., urea, ammonia, ammonium hydroxide) during fermentation, when compared to an otherwise identical fermenting organism lacking the heterologous polynucleotide encoding the transporter.
Paragraph [178]. The yeast cell of any one of paragraphs [164]-[177], wheren the cell is capable of increased consumption of tripeptides or tetrapeptides under conditions described herein (e.g., decreased residual tripeptides or tetrapeptides in the fermentation medium after 29 hours of fermentation), when compared to an otherwise identical fermenting organism lacking the heterologous polynucleotide encoding the transporter.
Paragraph [179]. The yeast cell of any one of paragraphs [164]-[178], wherein the cell further comprises a heterologous polynucleotide encoding a glucoamylase.
Paragraph [180]. The yeast cell of paragraph [179], wherein the heterologous polynucleotide encoding the glucoamylase is operably linked to a promoter that is foreign to the polynucleotide.
Paragraph [181]. The yeast cell of paragraph [179] or [180], wherein the glucoamylase is a Pycnoporus glycoamylase (e.g. a Pycnoporus sanguineus glucoamylase described herein), a Gloeophyllum glucoamylase (e.g. a Gloeophyllum sepiarium or Gloeophyllum trabeum glucoamylase described herein), or a Saccharomycopsis glucoamylase (e.g., a Saccharomycopsis fibuligera glucoamylase, such as SEQ ID NO: 102 or 103 of WO2018/222990).
Paragraph [182]. The yeast cell of any one of paragraphs [164]-[181], wherein the cell further comprises a heterologous polynucleotide encoding an alpha-amylase.
Paragraph [183]. The yeast cell of paragraph [182], wherein the heterologous polynucleotide encoding the alpha-amylase is operably linked to a promoter that is foreign to the polynucleotide.
Paragraph [184]. The yeast cell of paragraph [182] or [183], wherein the alpha-amylase is a Bacillus alpha-amylase (e.g., a Bacillus stearothermophilus, Bacillus amyloliquefaciens, or Bacillus licheniformis alpha-amylase described herein), or a Debaryomyces alpha-amylase (e.g., a Debaryomyces occidentalis alpha-amylase described herein).
Paragraph [185]. The yeast cell of any one of paragraphs [164]-[184], wherein the cell further comprises a heterologous polynucleotide encoding protease.
Paragraph [186]. The yeast cell of paragraph [185], wherein the cell further comprises a heterologous polynucleotide encoding protease.
Paragraph [187]. The yeast cell of [185] or [186], wherein the protease is a Meripilus giganteus, Trametes versicolor, Dichomitus squalens, Polyporus arcularius, Lenzites betulinus, Ganoderma lucidum, Neolentinus lepideus, or Bacillus sp. 19138 protease (e.g., a protease having the sequence of any one of SEQ ID NOs: 9-73 of WO2018/222990).
Paragraph [188]. The yeast cell of any one of paragraphs [164]-[187], wherein the cell further comprises a heterologous polynucleotide encoding a transporter having at least 60%, e.g., at least 65%, 70%, 75%, 80%, 85%, 90%, 95%, 97%, 98%, 99%, or 100% sequence identity to the amino acid sequence of any one of the transporters of Table 1 (e.g., any one of SEQ ID NOs: 86-162 and 165-170).
Paragraph [189]. The yeast cell of any one of paragraphs [164]-[188], wherein the cell further comprises a heterologous polynucleotide encoding a transporter having at least 60%, e.g., at least 65%, 70%, 75%, 80%, 85%, 90%, 95%, 97%, 98%, 99%, or 100% sequence identity to the amino acid sequence of SEQ ID NO: 129, SEQ ID NO: 130 or SEQ ID NO: 161.
Paragraph [190]. The yeast cell of any one of paragraphs [164]-[189], wherein the cell comprises a disruption to an endogenous transporter gene, such as any one of the transporter genes shown in Table 1 (e.g., any one of SEQ ID NOs: 1-77 and 80-85) and/or any one of the Amino Acid/Auxin Permease (AAAP) genes shown in Table 2 (e.g., any one of SEQ ID NOs: 78, 79 and 322-431).
Paragraph [191]. The yeast cell of paragraph [190], wherein the disrupted endogenous transporter gene is inactivated.
Paragraph [192]. The yeast cell of paragraph [190] or [191], wherein the coding sequence of the endogenous transporter gene has at least 60%, e.g., at least 65%, at least 70%, at least 75%, at least 80%, at least 85%, at least 90%, at least 95%, at least 96%, at least 97%, at least 98%, at least 99%, or 100% sequence identity to the coding sequence of any one of the transporters shown in Table 1 (e.g., any one of SEQ ID NOs: 1-77 and 80-85) or any one of the Amino Acid/Auxin Permease (AAAP) genes shown in Table 2 (e.g., any one of SEQ ID NOs: 78, 79 and 322-431).
Paragraph [193]. The yeast cell of any one of paragraphs [190]-[192], wherein the endogenous transporter gene encodes a transporter having at least 60%, e.g., at least 65%, at least 70%, at least 75%, at least 80%, at least 85%, at least 90%, at least 95%, at least 96%, at least 97%, at least 98%, at least 99%, or 100% sequence identity to the any one of the transporters shown in Table 1 (e.g., any one of SEQ ID NOs: 86-162 and 165-170) or any one of the Amino Acid/Auxin Permeases (AAAPs) shown in Table 2 (e.g., any one of SEQ ID NOs: 163, 164 and 432-541).
Paragraph [194]. The yeast cell of any one of paragraphs [164]-[193], wherein the cell further comprises a heterologous polynucleotide encoding a regulator, wherein the regulator has at least 60%, e.g., at least 65%, 70%, 75%, 80%, 85%, 90%, 95%, 97%, 98%, 99%, or 100% sequence identity to the amino acid sequence of any one of the regulators shown in Table 3 (e.g., any one of SEQ ID NOs: 231-290).
Paragraph [195]. The yeast cell of any one of paragraphs [164]-[194], wherein the cell comprises a disruption to an endogenous regulator gene.
Paragraph [196]. The yeast cell of [195], wherein the disrupted endogenous regulator gene is inactivated.
Paragraph [197]. The yeast cell of [195] or [196], wherein the coding sequence of the endogenous regulator gene has at least 60%, e.g., at least 65%, at least 70%, at least 75%, at least 80%, at least 85%, at least 90%, at least 95%, at least 96%, at least 97%, at least 98%, at least 99%, or 100% sequence identity to the coding sequence of any one of the regulator genes shown in Table 3 (e.g., any one of SEQ ID NOs: 171-230).
Paragraph [198]. The yeast cell of any one of paragraphs [195]-[197], wherein the endogenous gene encodes a regulator having at least 60%, e.g., at least 65%, at least 70%, at least 75%, at least 80%, at least 85%, at least 90%, at least 95%, at least 96%, at least 97%, at least 98%, at least 99%, or 100% sequence identity to the any one of the regulators shown in Table 3 (e.g., any one of SEQ ID NOs: 231-290).
Paragraph [199]. The yeast cell of any one of paragraphs [164]-[198], wherein the cell is a Saccharomyces, Rhodotorula, Schizosaccharomyces, Kluyveromyces, Pichia, Issatchenkia, Hansenula, Rhodosporidium, Candida, Torulaspora, Zygosaccharomyces, Yarrowia, Lipomyces, Cryptococcus, or Dekkera sp. cell.
Paragraph [200]. The yeast cell of [199], wherein the cell is a I. orientalis, C. lambica, S. bulderi or a S. cerevisiae cell.
Paragraph [201]. The yeast cell of [200], wherein the cell is a Saccharomyces cerevisiae cell.
Paragraph [202]. A yeast cell comprising a heterologous polynucleotide encoding an Amino Acid/Auxin Permease (AAAP), wherein the yeast further comprises a disruption to an endogenous transporter gene.
Paragraph [203]. The yeast cell of paragraph [202], wherein the Amino Acid/Auxin Permease (AAAP) comprises one or more motifs selected from:
[0656] Motif A: L-[I,L]-T-T-D-[I,V]-L-G-P (SEQ ID NO: 542);
[0657] Motif B: [V,I]-[F,Y]-[A,S]-[F,Y,W]-G-G (SEQ ID NO: 543);
[0658] Motif C: E-[M, L]-[A, K, R]-[H, K, N, R]-P-X-[D, E]-F (SEQ ID NO: 544); and
[0659] Motif D: A-X-X-L-Y-[G,S]-N-[I,V]-[A,G,S]-[I,L,V]-K-X-X-Y (SEQ ID NO: 545).
   Paragraph [204]. The yeast cell of paragraph [202], wherein the Amino Acid/Auxin Permease (AAAP) comprises Motif A: L-[I,L]-T-T-D-[I,V]-L-G-P (SEQ ID NO: 542).
   Paragraph [205]. The yeast cell of paragraph [202], wherein Motif A is Motif A2: L-I-T-T-D-I-L-G-P (SEQ ID NO: 546).
   Paragraph [206]. The yeast cell of paragraph [202], wherein the Amino Acid/Auxin Permease (AAAP) comprises Motif D: A-X-X-L-Y-[G,S]-N-[I,V]-[A,G,S]-[I,L,V]-K-X-X-Y (SEQ ID NO: 545).
   Paragraph [207]. The yeast cell of paragraph [202], wherein the Amino Acid/Auxin Permease (AAAP) comprises Motif B: [V,I]-[F,Y]-[A,S]-[F,Y,W]-G-G (SEQ ID NO: 543) and Motif C: E-[M, L]-[A, K, R]-[H, K, N, R]-P-X-[D, E]-F (SEQ ID NO: 544).
   Paragraph [208]. The yeast cell of any one of paragraphs [202]-[207], wheren the Amino Acid/Auxin Permease (AAAP) has at least 60%, e.g., at least 65%, 70%, 75%, 80%, 85%, 90%, 95%, 97%, 98%, 99%, or 100% sequence identity to the amino acid sequence of any one of the AAAPs shown in Table 2 (e.g., any one of SEQ ID NOs: 163, 164 and 432-541).
   Paragraph [209]. The yeast cell of any one of paragraphs [202]-[208], wherein the Amino Acid/Auxin Permease (AAAP) differs by no more than ten amino acids, e.g., by no more than five amino acids, by no more than four amino acids, by no more than three amino acids, by no more than two amino acids, or by one amino acid from amino acid sequence of any one of the AAAPs shown in Table 2 (e.g., any one of SEQ ID NOs: 163, 164 and 432-541).
   Paragraph [210]. The yeast cell of paragraph [209], wherein the Amino Acid/Auxin Permease (AAAP) comprises or consists of the amino acid sequence of any one of the AAAPs shown in Table 2 (e.g., any one of SEQ ID NOs: 163, 164 and 432-541).
   Paragraph [211]. The yeast cell of any one of paragraphs [202]-[210], wherein the heterologous polynucleotide encoding the transporter is introduced into the cell using recombinant techniques.
   Paragraph [212]. The yeast cell of any one of paragraphs [202]-[211], wherein the heterologous polynucleotide encoding the transporter is operably linked to a promoter that is foreign to the polynucleotide.
   Paragraph [213]. The yeast cell of paragraph any one of paragraphs [202]-[210], wherein the heterologous polynucleotide encoding the transporter is introduced into the cell using non-recombinant breeding techniques.
   Paragraph [214]. The yeast cell of any one of paragraphs [202]-[213], wherein the disrupted endogenous transporter gene is inactivated.
   Paragraph [215]. The yeast cell of [213] or [214], wherein the coding sequence of the endogenous transporter gene has at least 60%, e.g., at least 65%, at least 70%, at least 75%, at least 80%, at least 85%, at least 90%, at least 95%, at least 96%, at least 97%, at least 98%, at least 99%, or 100% sequence identity to the coding sequence of any one of the transporters shown in Table 1 (e.g., any one of SEQ ID NOs: 1-77 and 80-85) or any one of the Amino Acid/Auxin Permease (AAAP) genes shown in Table 2 (e.g., any one of SEQ ID NOs: 78, 79 and 322-431).
   Paragraph [216]. The yeast cell of any one of paragraphs [202], [214] or [215], wherein the endogenous transporter gene encodes a transporter having at least 60%, e.g., at least 65%, at least 70%, at least 75%, at least 80%, at least 85%, at least 90%, at least 95%, at least 96%, at least 97%, at least 98%, at least 99%, or 100% sequence identity to the any one of the transporters shown in Table 1 (e.g., any one of SEQ ID NOs: 86-162 and 165-170) or any one of the Amino Acid/Auxin Permeases (AAAPs) shown in Table 2 (e.g., any one of SEQ ID NOs: 163, 164 and 432-541).
   Paragraph [217]. The yeast cell of paragraph any one of paragraphs [202]-[216], wheren the cell is capable of maintaining the same yield of a fermentation product with less supplemental nitrogen (e.g., urea, ammonia, ammonium hydroxide) during fermentation, when compared to an otherwise identical fermenting organism lacking the heterologous polynucleotide encoding the transporter.
   Paragraph [218]. The yeast cell of paragraph any one of paragraphs [202]-[217], wheren the cell is capable of increased consumption of tripeptides or tetrapeptides under conditions described herein (e.g., decreased residual tripeptides or tetrapeptides in the fermentation medium after 29 hours of fermentation), when compared to an otherwise identical fermenting organism lacking the heterologous polynucleotide encoding the transporter.
   Paragraph [219]. The yeast cell of paragraph any one of paragraphs [202]-[218], wherein the cell further comprises a heterologous polynucleotide encoding a glucoamylase.
   Paragraph [220]. The yeast cell of paragraph [219], wherein the heterologous polynucleotide encoding the glucoamylase is operably linked to a promoter that is foreign to the polynucleotide.
   Paragraph [221]. The yeast cell of paragraph [219] or [220], wherein the glucoamylase is a Pycnoporus glycoamylase (e.g. a Pycnoporus sanguineus glucoamylase described herein), a Gloeophyllum glucoamylase (e.g. a Gloeophyllum sepiarium or Gloeophyllum trabeum glucoamylase described herein), or a Saccharomycopsis glucoamylase (e.g., a Saccharomycopsis fibuligera glucoamylase, such as SEQ ID NO: 102 or 103 of WO2018/222990).
   Paragraph [222]. The yeast cell of any one of paragraphs [202]-[221], wherein the cell further comprises a heterologous polynucleotide encoding an alpha-amylase.
   Paragraph [223]. The yeast cell of paragraph [222], wherein the heterologous polynucleotide encoding the alpha-amylase is operably linked to a promoter that is foreign to the polynucleotide.
   Paragraph [224]. The yeast cell of paragraph [222] or [223], wherein the alpha-amylase is a Bacillus alpha-amylase (e.g., a Bacillus stearothermophilus, Bacillus amyloliquefaciens, or Bacillus licheniformis alpha-amylase described herein), or a Debaryomyces alpha-amylase (e.g., a Debaryomyces occidentalis alpha-amylase described herein).
   Paragraph [225]. The yeast cell of any one of paragraphs [202]-[224], wherein the cell further comprises a heterologous polynucleotide encoding protease.
   Paragraph [226]. The yeast cell of paragraph [225], wherein the heterologous polynucleotide encoding the protease is operably linked to a promoter that is foreign to the polynucleotide.
   Paragraph [227]. The yeast cell of paragraph [225] or [226], wherein the protease is a Meripilus giganteus, Trametes versicolor, Dichomitus squalens, Polyporus arcularius, Lenzites betulinus, Ganoderma lucidum, Neolentinus lepideus, or Bacillus sp. 19138 protease (e.g., a protease having the sequence of any one of SEQ ID NOs: 9-73 of WO2018/222990).
   Paragraph [228]. The yeast cell of any one of paragraphs [202]-[227], wherein the cell further comprises a heterologous polynucleotide encoding a transporter having at least 60%, e.g., at least 65%, 70%, 75%, 80%, 85%, 90%, 95%, 97%, 98%, 99%, or 100% sequence identity to the amino acid sequence of any one of the transporters of Table 1 (e.g., any one of SEQ ID NOs: 86-162 and 165-170).
   Paragraph [229]. The yeast cell of any one of paragraphs [202]-[228], wherein the cell further comprises a heterologous polynucleotide encoding a transporter having at least 60%, e.g., at least 65%, 70%, 75%, 80%, 85%, 90%, 95%, 97%, 98%, 99%, or 100% sequence identity to the amino acid sequence of SEQ ID NO: 129, SEQ ID NO: 130 or SEQ ID NO: 161.
   Paragraph [230]. The yeast cell of any one of paragraphs [202]-[229], wherein the cell further comprises a heterologous polynucleotide encoding a regulator, wherein the regulator has at least 60%, e.g., at least 65%, 70%, 75%, 80%, 85%, 90%, 95%, 97%, 98%, 99%, or 100% sequence identity to the amino acid sequence of any one of the regulators shown in Table 3 (e.g., any one of SEQ ID NOs: 231-290).
   Paragraph [231]. The yeast cell of any one of paragraphs [202]-[230], wherein the cell comprises a disruption to an endogenous regulator gene.
   Paragraph [232]. The yeast cell of [231], wherein the disrupted endogenous regulator gene is inactivated.
   Paragraph [233]. The yeast cell of [231] or [232], wherein the coding sequence of the endogenous regulator gene has at least 60%, e.g., at least 65%, at least 70%, at least 75%, at least 80%, at least 85%, at least 90%, at least 95%, at least 96%, at least 97%, at least 98%, at least 99%, or 100% sequence identity to the coding sequence of any one of the regulator genes shown in Table 3 (e.g., any one of SEQ ID NOs: 171-230).
   Paragraph [234]. The yeast cell of any one of paragraphs [231]-[233], wherein the endogenous gene encodes a regulator having at least 60%, e.g., at least 65%, at least 70%, at least 75%, at least 80%, at least 85%, at least 90%, at least 95%, at least 96%, at least 97%, at least 98%, at least 99%, or 100% sequence identity to the any one of the regulators shown in Table 3 (e.g., any one of SEQ ID NOs: 231-290).
   Paragraph [235]. The yeast cell of any one of paragraphs [202]-[234], wherein the cell is a Saccharomyces, Rhodotorula, Schizosaccharomyces, Kluyveromyces, Pichia, Issatchenkia, Hansenula, Rhodosporidium, Candida, Torulaspora, Zygosaccharomyces, Yarrowia, Lipomyces, Cryptococcus, or Dekkera sp. cell.
   Paragraph [236]. The yeast cell of [235], wherein the cell is a I. orientalis, C. lambica, S. bulderi or a S. cerevisiae cell.
   Paragraph [237]. The yeast cell of [236], wherein the cell is a Saccharomyces cerevisiae cell.
   Paragraph [238]. A composition comprising the yeast strain of any one of paragraphs [56]-[237] and one or more naturally occurring and/or non-naturally occurring components, such as components are selected from the group consisting of: surfactants, emulsifiers, gums, swelling agents, and antioxidants.
   Paragraph [239]. A method of producing a derivative of a yeast strain of paragraph [56]-[237], the method comprising:
[0660] (a) providing:
   [0661] (i) a first yeast strain; and
   [0662] (ii) a second yeast strain, wherein the second yeast strain is a strain of any one of paragraphs [56]-[237];
[0663] (b) culturing the first yeast strain and the second yeast strain under conditions which permit combining of DNA between the first and second yeast strains;
[0664] (c) screening or selecting for a derivatived yeast strain comprising the heterologous polynucleotide encoding the transporter.
   Paragraph [240]. A method of producing ethanol, comprising incubating a strain of any one of paragraphs [56]-[237] with a substrate comprising a fermentable sugar under conditions which permit fermentation of the fermentable sugar to produce ethanol.
   Paragraph [241]. Use of a strain of any one of paragraphs [56]-[237] in the production of ethanol.
   Paragraph [242]. A method of producing a fermentation product from a starch-containing or cellulosic-containing material comprising:
   (a) saccharifying the starch-containing or cellulosic-containing material; and
   (b) fermenting the saccharified material of step (a) with the yeast cell of any one of paragraphs [56]-[237].
   Paragraph [243]. The method of paragraph [242], comprising liquefying the starch-containing material at a temperature above the initial gelatinization temperature in the presence of an alpha-amylase prior to saccharification.
   Paragraph [244]. The method of paragraph [243], comprising adding a protease in liquefaction.
   Paragraph [245]. The method of paragraph [244], wherein the protease is a serine protease, e.g., an S8 protease.
   Paragraph [246]. The method of paragraph [244] or [245], wherein the protease is a bacterial protease, particularly a protease derived form Pyrococcus, Palaeococcus, or Thermococcus, more particularly Pyrococcus furiosus, Palaeococcus ferrophilus, Thermococcus litoralis, Thermococcus thioreducens.
   Paragraph [247]. The method of any one of paragraphs [244]-[246], wherein the protease is selected from the group consisting of SEQ ID NO: 291, SEQ ID NO: 292, SEQ ID NO: 293, SEQ ID NO: 294, and SEQ ID NO: 295, or a variant of any one of SEQ ID NO: 291, SEQ ID NO: 292, SEQ ID NO: 293, SEQ ID NO: 294, and SEQ ID NO: 295 having at least at least 60%, e.g., at least 65%, at least 70%, at least 75%, at least 80%, at least 85%, at least 90%, at least 91%, at least 92%, at least 93%, at least 94%, at least 95%, at least 96%, at least 97%, at least 98%, or at least 99% sequence identity thereto.
   Paragraph [248]. The method of any one of paragraphs [242]-[247], wherein fermentation and saccharification are performed simultaneously in a simultaneous saccharification and fermentation (SSF).
   Paragraph [249]. The method of any one of paragraphs [242]-[247], wherein fermentation and saccharification are performed sequentially (SHF).
   Paragraph [250]. The method of any one of paragraphs [242]-[249], comprising recovering the fermentation product from the from the fermentation.
   Paragraph [251]. The method of paragraph [250], wherein recovering the fermentation product from the from the fermentation comprises distillation.
   Paragraph [252]. The method of any one of paragraphs [242]-[251], wherein the fermentation product is ethanol.
   Paragraph [253]. The method of paragraph [252], wherein the ethanol yield is more than 1.0%, e.g., more than 2.0%, more than 2.5%, more than 3.0%, more than 3.5%, more than 4.0%, more than 4.5%, more than 5.0%, more than 5.5%, more than 6.0%, more than 6.5%, more than 7.0%, more than 7.5%, more than 8.0%, more than 8.5%, more than 9.0%, more than 9.5%, or more than 10.0%, greater than Saccharomyces cerevisiae strain Ethanol Red® (ER; deposited under Accession No. V14/007039 at National Measurement Institute, Victoria, Australia) under the same conditions (e.g., under conditions described herein, such as after 53 hours fermentation).
   Paragraph [254]. The method of paragraph [252] or [253], wherein the ethanol yield is more than 1.0%, e.g., more than 2.0%, more than 2.5%, more than 3.0%, more than 3.5%, more than 4.0%, more than 4.5%, more than 5.0%, more than 5.5%, more than 6.0%, more than 6.5%, more than 7.0%, more than 7.5%, more than 8.0%, more than 8.5%, more than 9.0%, more than 9.5%, or more than 10.0%, greater when compared to an otherwise identical fermenting organism lacking the heterologous polynucleotide encoding the transporter.
   Paragraph [255]. The method of any one of paragraphs [242]-[254], wherein saccharification of step (a) occurs on a starch-containing material, and wherein the starch-containing material is either gelatinized or ungelatinized starch.
   Paragraph [256]. The method of any one of paragraphs [242]-[254], wherein saccharification of step (a) occurs on a cellulosic-containing material, and wherein the cellulosic-containing material is pretreated.
   Paragraph [257]. The method of paragraph [257], wherein the pretreatment is a dilute acid pretreatment.
   Paragraph [258]. The method of any one of paragraphs [242]-[257], wherein saccharification occurs on a cellulosic-containing material, and wherein the enzyme composition comprises one or more enzymes selected from a cellulase, an AA9 polypeptide, a hemicellulase, a CIP, an esterase, an expansin, a ligninolytic enzyme, an oxidoreductase, a pectinase, a protease, and a swollenin.
   Paragraph [259]. The method of paragraph [258], wherein the cellulase is one or more enzymes selected from an endoglucanase, a cellobiohydrolase, and a beta-glucosidase.
   Paragraph [260]. The method of paragraph [258], wherein the hemicellulase is one or more enzymes selected a xylanase, an acetylxylan esterase, a feruloyl esterase, an arabinofuranosidase, a xylosidase, and a glucuronidase.
   Paragraph [261]. The method of any one of paragraphs [1]-[55], with the proviso that the Amino Acid/Auxin Permease is not from Torulaspora microellipsoides (such as the AAAP of SEQ ID NO: 163 and/or the AAAP of SEQ ID NO: 164).
   Paragraph [262]. The yeast of any one of paragraphs [56]-[238], with the proviso that the Amino Acid/Auxin Permease is not from Torulaspora microellipsoides (such as the AAAP of SEQ ID NO: 163 and/or the AAAP of SEQ ID NO: 164).

### DEPOSIT OF BIOLOGICAL MATERIAL

[0665] The following biological material has been deposited under the terms of the Budapest Treaty with the National Measurement Institute, Victoria, Australia and given the following accession number:

| Deposit | Accession Number | Date of Deposit |
|---|---|---|
| Ethanol Red ® (ER) | V14/007039 | Mar. 19, 2014 |
| MBG4851 | V14/004037 | Feb. 17, 2014 |
| MBG4911 | V15/001459 | Jan. 13, 2015 |
| MBG4913 | V15/001460 | Jan. 13, 2015 |
| MBG4914 | V15/001461 | Jan. 13, 2015 |
| MBG4930 | V15/004035 | Feb. 19, 2015 |
| MBG4931 | V15/004036 | Feb. 19, 2015 |
| MBG4932 | V15/004037 | Feb. 19, 2015 |

[0666] The strains have been deposited under conditions that assure that access to the culture will be available during the pendency of this patent application to one determined by the Commissioner of Patents and Trademarks to be entitled thereto under 37 C.F.R. § 1.14 and 35 U.S.C. § 122. The deposit represents a substantially pure culture of the deposited strain. The deposit is available as required by foreign patent laws in countries wherein counterparts of the subject application, or its progeny are filed. However, it should be understood that the availability of a deposit does not constitute a license to practice the subject invention in derogation of patent rights granted by governmental action.

[0667] The invention described and claimed herein is not to be limited in scope by the specific aspects herein disclosed, since these aspects are intended as illustrations of several aspects of the invention. Any equivalent aspects are intended to be within the scope of this invention. Indeed, various modifications of the invention in addition to those shown and described herein will become apparent to those skilled in the art from the foregoing description. Such modifications are also intended to fall within the scope of the appended claims. In the case of conflict, the present disclosure including definitions will control. All references are specifically incorporated by reference for that which is described.

[0668] The following examples are offered to illustrate certain aspects of the present invention, but not in any way intended to limit the scope of the invention as claimed.

### EXAMPLES

### Example 1: Peptide Uptake

[0669] Peptide uptake for strains MBG4994 (which comprises the expression cassates for FotX and Fot2 genes; and was prepared according the breeding procedures described in U.S. Pat. No. 8,257,959) vs Ethanol Red® (ER; Fermentis/Lesaffre, USA) was determined at 24 h (relative to time 0 h) during corn mash ethanol fermentation. Corn mash was industrially generated at an ethanol plant using Avantec® Amp (commercially available enzyme from Novozymes A/S containing an alpha-amylase and a protease). Fermentation was carried out in 125 ml flasks containing 50 grams of corn mash inoculated with 10 million cells/g, and dosed with a cocktail of glucoamylase enzymes. No urea was added to the corn mash. Tubes were incubated at 32° C. FIG. 1 shows significant improvement in uptake of tripeptide and tetrapeptides by MBG4994 compared to Ethanol Red® (ER).

### Example 2: Deletion of a Transporter Genes from a Yeast Strain

[0670] This example describes the construction of a yeast strain containing a deletion of a gene encoding a transporter or other gene involved in nitrogen metabolism. First, a protospacer sequence was added to a CRISPR/Cas9 base vector to direct a double-strand break to the locus of interest. The plasmid created by the protospacer addition was then transformed into yeast along with repair DNA. This repair DNA is homologous to the region 5′ of the start codon of the gene of interest at the 5′ end of the repair DNA and is homologous to the region 3′ of the stop codon of the gene of interest at the 3′ end of the repair DNA. Thus, the Cas9 protein as encoded in the plasmid vector cut the desired DNA based on homology to the protospacer sequence at the locus of interest, and then the repair DNA repaired the cut with DNA lacking the coding region of the gene of interest, resulting in deletion of the gene of interest.

[0671] The CRISPR/Cas9 base vector used was pMBin369 (See FIG. 6): a yeast episomal plasmid containing a nourseothricin resistance marker for selection in yeast, an expression cassette for Cas9-NLS, and a Pmel restriction site between the tRNA promoter and the structural crRNA encoding sequence. To target a gene for cutting by Cas9, a protospacer adjacent to an NGG sequence was found for each gene of interest. A linear oligonucleotide was obtained containing the DNA sequence homologous to 5′ of the Pmel site in pMBin369 (5-ATTCCCAGCTCGCCCC-3′; SEQ ID NO: 296), the protospacer sequence as shown in Table 4, and the DNA sequence homologous to 3′ of the Pmel site in pMBin369 (5-GTTTTAGAGCTAGAAA-3′; SEQ ID NO: 297). The linear, single-stranded oligonucleotide was then added to Pmel digested pMBin369 using the NEBuilder® HiFi DNA Assembly Master Mix (New England BioLabs) per the manufacturer's instructions.

[0672] To target deletion of each gene of interest, repair oligonucleotides were designed to remove the entire open reading frame of the gene of interest. One of the repair oligonucleotides was in the forward direction of the gene of interest and contained the 45 bases just 5′ of the gene of interest, ending at the nucleotide just prior to ATG start codon of the gene of interest, fused directly to the 45 bases just 3′ of the gene of interest, starting at the nucleotide immediately 3′ of stop codon of the gene of interest. The other repair oligonucleotide was the reverse complement of the forward repair oligonucleotide. Sequences of the repair oligonucleotides used can be found in Table 5. Prior to use in yeast transformation, the two oligonucleotides for a gene of interest were annealed into a double-strand repair DNA via mixing of the two oligonucleotides together, heating the mixture to 98° C., and then slowly cooling to room temperature to allow oligonucleotide annealing.

[0673] To create the desired yeast strains with a gene of interest deleted, the CRISPR/Cas9 plasmid and the appropriate repair DNAs as shown in Table 4 were transformed into the yeast strain of interest following a yeast electroporation protocol (See, Thompson et al. Yeast. 1998 Apr. 30; 14(6):565-71). Transformants were selected on YPD+clonNAT (Yeast extract, 10 g. Peptone, 20 g. Dextrose, 20 g., clonNAT 0.1 g, dissolve in 1 L of distilled water) to select for transformants that contain the CRISPR/Cas9 plasmid. Individual transformant colonies were picked to a new YPD+cloNAT plate and then screened for deletion of the gene of interest using PCR with locus specific primers.

TABLE 4

| Gene | Plasmid | Protospacer | Repair |
|---|---|---|---|
| Name | name | sequence | oligos |
| Fot2 | pMHCT415 | 5′-ATGTAGAAAAAGGA | 1226919 + |
| | | GAACAA-3′ | 1226927 |
| | | (SEQ ID NO: 298) | |
| FotX | pMHCT417 | 5′-AGAAAGAAAAAGGA | 1226920 + |
| | | TCTCAA-3′ | 1226928 |
| | | (SEQ ID NO: 299) | |
| opt1 | pMHCT419 | 5′-GGAGAATTGGGCAA | 1226921 + |
| | | GTATGT-3′ | 1226929 |
| | | (SEQ ID NO: 300) | |
| opt2 | pMHCT421 | 5′-GATGAGAAGGTATC | 1226922 + |
| | | CACAAA-3′ | 1226930 |
| | | (SEQ ID NO: 301) | |
| YGL114W | pMHCT428 | 5′-ACACTCCGAGCAAC | 1226925 + |
| | | CATAGC-3′ | 1226933 |
| | | (SEQ ID NO: 302) | |
| ptr1 | pMHCT425 | 5′-TCCGTTGCTGATGA | 1226924 + |
| | | TGATTT-3′ | 1226932 |
| | | (SEQ ID NO: 303) | |
| ptr2 | pMHCT424 | 5′-GTCTTCTCCTCTTC | 1226923 + |
| | | GATGAC-3′ | 1226931 |
| | | (SEQ ID NO: 304) | |
| dal5 | pMHCT414 | 5′-TGGTGTCACTTCGA | 1226918 + |
| | | TTTCTT-3′ | 1226926 |
| | | (SEQ ID NO: 305) | |

TABLE 5

| Repair | |
|---|---|
| oligo | |
| name | Repair oligo sequence |
| 1226918 | 5′-ACAACAAAAC AAGGATAATC AAATAGTGTA |
| | AAAAAAAAAT TCAAGAATAG TGGTGAGATA |
| | CACTGACATT ATTGTTATCA GAGAAGAAT A-3′ |
| | (SEQ ID NO: 306) |
| 1226919 | 5′-CAGTCTATTC CATTTGACTG AAGAAAAAAA |
| | AATTTATTAC TGAAGAATAG TCGCCACAA |
| | AGAGGATGCA AACCAATGGT GCGAAACACT G-3′ |
| | (SEQ ID NO: 307) |
| 1226920 | 5′-TACGACGTTC CATTCGACTG AAAAAAAAAA |
| | TATTTATCGC TGAAGGGCAG TTGCCATCAC |
| | AGGACGACGG AAATCCCATG GTGAGGGACT-3′ |
| | (SEQ ID NO: 308) |
| 1226921 | 5′-TGTGGCAGAA AATAACCGCA ACAATTATAT |
| | AACGTCACAG AACACTCATG AAAACATAAT |
| | AATAAACCTG CAGAGGTTCA TATCAAGTTT-3′ |
| | (SEQ ID NO: 309) |
| 1226922 | 5′-GTAGGGTTTG TTATACGCAA TATTGCTGTT |
| | GAATTATTAG AAATTCTAGA ACTTTTCTTA |
| | GAACGCTACC ATTTCTTTAT TTTTTTTGCA-3′ |
| | (SEQ ID NO: 310) |
| 1226923 | 5′-TTATTTTTTT TTTCTTTTGA ATTAGATCAC |
| | TAATAAACTC TTATATGCGT TTAATTAACT |
| | TACTGTCTTT TTTTTTTTTT TTTTAACCAT-3′ |
| | (SEQ ID NO: 311) |
| 1226924 | 5′-TCCCTAATCT TTACAGGTCA CACAAATTAC |
| | ATAGAACATT CCAATATTCA AGCCCTCTAC |
| | TATGTTTTAT AGTTGACATA TTTGTATATA-3′ |
| | (SEQ ID NO: 312) |
| 1226925 | 5′-GACTAACCGT TAAAGATTCT AAATCGGTAC |
| | TGTAAATACT TTGAAGGTAT ATAATATTTT |
| | ACTAATAAAG AATTTACAAA GTTTACAAAT-3′ |
| | (SEQ ID NO: 313) |
| 1226926 | 5′-TATTCTTCTC TGATAACAAT AATGTCAGTG |
| | TATCTCACCA CTATTCTTGA ATTTTTTTTT |
| | TACACTATTT GATTATCCTTG TTTTGTTGT-3′ |
| | (SEQ ID NO: 314) |
| 1226927 | 5′-CAGTGTTTCG CACCATTGGT TTGCATCCTC |
| | TTTGTGGCGA CTATTCTTCA GTAATAAATT |
| | TTTTTTTCTT CAGTCAAATG GAATAGACTG-3′ |
| | (SEQ ID NO: 315) |
| 1226928 | 5′-AGTCCCTCAC CATGGGATTT CCGTCGTCCT |
| | GTGATGGCAA CTGCCCTTCA GCGATAAATA |
| | TTTTTTTTTT CAGTCGAATG GAACGTCGTA-3′ |
| | (SEQ ID NO: 316) |
| 1226929 | 5′-AAACTTGATA TGAACCTCTG CAGGTTTATT |
| | ATTATGTTTT CATGAGTGTT CTGTGACGTT |
| | ATATAATTGT TGCGGTTATT TTCTGCCACA-3′ |
| | (SEQ ID NO: 317) |
| 1226930 | 5′-TGCAAAAAAA ATAAAGAAAT GGTAGCGTTC |
| | TAAGAAAAGT TCTAGAATTT CTAATAATTC |
| | AACAGCAATA TTGCGTATAA CAAACCCTAC-3′ |
| | (SEQ ID NO: 318) |
| 1226931 | 5′-ATGGTTAAAA AAAAAAAAAA AAAGACAGTA |
| | AGTTAATTAA ACGCATATAA GAGTTTATTA |
| | GTGATCTAAT TCAAAAGAAA AAAAAAATAA-3′ |
| | (SEQ ID NO: 319) |
| 1226932 | 5′-TATATACAAA TATGTCAACT ATAAAACATA |
| | GTAGAGGGCT TGAATATTGG AATGTTCTAT |
| | GTAATTTGTG TGACCTGTAA AGATTAGGGA-3′ |
| | (SEQ ID NO: 320) |
| 1226933 | 5′-ATTTGTAAAC TTTGTAAATT CTTTATTAGTA |
| | AAATATTATA TACCTTCAAA GTATTTACAG |
| | TACCGATTTA GAATCTTTAA CGGTTAGTC-3′ |
| | (SEQ ID NO: 321) |

### Example 3: Deletion of Additional Gene(s) from a Yeast Strain Already Containing One or More Deleted Genes

[0674] This example describes the deletion of an additional gene encoding a transporter or other gene involved in nitrogen metabolism in a yeast strain that contains an exisiting deletion of a gene encoding a transporter or other gene involved in nitrogen metabolism.

[0675] To remove the CRISPR/Cas9 plasmid from a deletion strain as constructed in Example 2, the yeast strain of interest was streaked for single colonies on a YPD plate. Once colonies formed, a few were picked and simultaneously patched to a YPD plate and to a YPD+clonNAT plate. An isolated colony that grew on YPD but failed to grow on YPD+clonNAT was chosen, since lack of growth on YPD+clonNAT indicated that the CRISPR/Cas9 plasmid had been lost.

[0676] The deletion strain just described was then transformed with a new CRISPR/Cas9 plasmid and annealed repair oligonucleotides, and a correctly deleted isolate was isolated as described in Example 2.

[0677] This process was used iteratively; for instance, a strain containing three deletions was transformed to delete a gene as described in Example 2 three times, with two intervening plasmid removal steps.

### Example 4: Recombinant Addition of Transporter Genes to Saccharomyces cerevisiae Yeast

[0678] The following example describes the construction of yeast strains containing an expression cassette for either Fot2 or FotX, or for an expression cassette containing both the Fot2 and FotX genes. The Fot genes were PCR amplified from yeast strain MBG4994 (either individually or as a pair) and then integrated into the X-3 locus (as described in Mikkelsen et al., 2012, Metabolic Engineering 14: 104-111) of the Saccharomyces cerevisiae yeast strain Ethanol Red® (ER) or integrated into the X-3 locus of an Ethanol Red® (ER) derived strain with opt1Δ opt2Δ ygl114wΔ.

[0679] To amplify the promoter, coding region, and terminator for each Fot gene from MBG4994, PCR primers were designed to amplify from approximately 1,000 bases 5′ of the gene of interest's start codon to approximately 500 bases 3′ of the gene of interest's stop codon. Flanking DNA for the X-3 locus was added to the 5′ end of each oligonucleotide to allow targeting of the amplicon to the X-3 integration site of Ethanol Red® (ER). The resulting primer sequences are shown in Table 4. To make the Fot2 integration DNA, a PCR was performed using MBG4994 genomic DNA, primers 1229007 and 1229008 (Table 6), and Taq DNA polymerase (New England BioLabs) per the manufacturer's instructions. To make the FotX integration DNA, a PCR was performed using MBG4994 genomic DNA, primers 1229009 and 1229010 (Table 6), and Taq DNA polymerase (New England BioLabs) per the manufacturer's instructions. Since Fot2 and FotX are adjacent to one another on the MBG4994 genome, a single PCR can be used to make an amplicon containing both genes: To make the Fot2+FotX integration DNA, a PCR was performed using MBG4994 genomic DNA, primers 1229007 and 1229010 (Table 6), and Taq DNA polymerase (New England BioLabs) per the manufacturer's instructions.

[0680] To create the desired Ethanol Red® (ER) derived yeast strains with an ectopic Fot expression cassette, the yeast strain Ethanol Red® (ER) was transformed following a yeast electroporation protocol with one of the Fot containing amplicons described above and pMCTS442, a CRISPR/Cas9 plasmid for yeast with a plasmid containing Cas9-NLS, guide RNA specific to X-3, and the nourseothricin selection marker. Transformants were selected on YPD+clonNAT to select for transformants that contain the CRISPR/Cas9 plasmid. Individual transformant colonies were picked to a new YPD+clonNAT plate and then screened for integration at X-3 using PCR with X-3 locus specific primers.

[0681] To create the desired Ethanol Red® (ER) opt1Δ opt2A ygl114wΔ derived yeast strains with an ectopic Fat expression cassette, the yeast strain Ethanol Red® (ER) opt1Δ opt2Δ ygl114wΔ was transformed and transformants screened as described for Ethanol Red® (ER) strain supra.

TABLE 6

| Primer | Primer Sequence |
|---|---|
| 1229007 | 5′-GAAACAATAG GCAAGAAGTA GGCGAGAGCC |
| | GACATACGAG ACTAATGTGT CCGCACTGAG |
| | GCGGAAGCAT TTGAGCCATC-3′ |
| | (SEQ ID NO: 322) |
| 1229008 | 5′-TCTTGAGCTC GTCCTTTTAC TAGCATATCA |
| | ATATCCGTTT CATTGAAAAG TGGTTTGCAT |
| | CAACACAGGA TGAACAGCAT GAATGTGCC-3′ |
| | (SEQ ID NO: 323) |
| 1229009 | 5′-GAAACAATAG GCAAGAAGTA GGCGAGAGCC |
| | GACATACGAG ACTAATGTGT CCGCCATGGA |
| | AGGATGTTTT GATAAGACCG GATGACG-3′ |
| | (SEQ ID NO: 324) |
| 1229010 | 5′-CGCTCTTGAG CTCGTCCTTT TACTAGCATA |
| | TCAATATCCG TTTCATTGAA AAGTGGGCCC |
| | TTCATTATTC TTCTCAAGTC TCTGACGCG-3′ |
| | (SEQ ID NO: 325) |
| 1218018 | 5′-GTTACTGTTG TCCACAGGC-3′ |
| | (SEQ ID NO: 326) |
| 1218019 | 5′-CTTGCTGCAT GGAGACAAGT G-3′ |
| | (SEQ ID NO: 327) |

[0682] To determine if the Fot2, FotX or Fot2 and FotX insertion in the yeast genome contained the DNA sequence as expected, PCR was used to amplify the expression cassette integrated at the X-3 locus. The primers used were 1218018 and 1218019 (Table 6). The resulting PCR amplification product was DNA sequenced. The transformants differed from Fot2 (SEQ ID NO: 163) and FotX (SEQ ID NO: 164) as shown in Table 7.

TABLE 7
Protein sequence information for yeast strains with Fot2, FotX, or Fot2 and
FotX expression cassettes at the X-3 locus. The pre-fix “het_”
in front of a change indicates that the change was heterozygous (change occurred
on one of the two copies of the expression cassette in the isolated diploid transformants).
Mutations without the “het_” pre-fix are homozygous.

| | | Expressed | |
|---|---|---|---|
| Strain | Background | Gene | Mutation |
| 1 | Ethanol Red ® (ER) | Fot2 | S2P, K39E, H232L, I324V |
| 2 | Ethanol Red ® (ER) | Fot2 | A11V, E22V, N481D |
| 3 | Ethanol Red ® (ER) | Fot2 | I128N, N208D, K311E |
| 4 | Ethanol Red ® (ER) | FotX | F491S |
| 5 | Ethanol Red ® (ER) | FotX | V41I, L413L, T442S, W445C |
| 6 | Ethanol Red ® (ER) + | Fot2 | T462I |
| | ΔOPT1ΔOPT2ΔYGL114 | | |
| 7 | Ethanol Red ® (ER) + | Fot2 | Q73L, R524T |
| | ΔOPT1ΔOPT2ΔYGL114 | | |
| 8 | Ethanol Red ® (ER) + | FotX | I113T, A527V |
| | ΔOPT1ΔOPT2ΔYGL114 | | |
| 9 | Ethanol Red ® (ER) + | FotX | (no changes) |
| | ΔOPT1ΔOPT2ΔYGL114 | | |
| 10 | Ethanol Red ® (ER) + | FotX | N397K, het_F158L, het_I314T, het_M329L |
| | ΔOPT1ΔOPT2ΔYGL114 | | |
| 11 | Ethanol Red ® (ER) + | FotX | T442A |
| | ΔOPT1ΔOPT2ΔYGL114 | | |
| 12 | Ethanol Red ® (ER) + | Fot2 and | Fot2 changes: L149P, A472V |
| | ΔOPT1ΔOPT2ΔYGL114 | FotX | FotX changes: K354STOP, A471V |
| 13 | Ethanol Red ® (ER) + | Fot2 and | Fot2 changes: Y94N, N417D |
| | ΔOPT1ΔOPT2ΔYGL114 | FotX | FotX changes: K25R, L128M, L162S, Q217R, |
| | | | W333R, Y370STOP |

### Example 5: Impact of Deletion of Peptide Transporters on Ethanol and Peptide Uptake During Ethanol Fermentation Using Corn Mash Produced Industrially by a Liquefaction Blend

[0683] This example describes the evaluation of yeast strains containing a deletion of one or more genes encoding a transporter or transporters involved in amino nitrogen uptake and metabolism. Particularly, the impact on ethanol kinetics, final ethanol titer and the uptake of peptides during ethanol fermentation with an industrially prepared corn mash is compared among the yeast strains listed in Table 8.

TABLE 8
Strains used in fermentation

4994 (MBG4994)
4994ΔFOT2ΔFOTX
4994ΔOPT1ΔOPT2Δygl114w
4994ΔOPT1ΔOPT2Δygl114wΔFOT2ΔFOTX
ER (Ethanol Red ®; Fermentis/Lesaffre, USA)
ERΔOPT1ΔOPT2Δygl114w

### Seed Culture:

[0684] Cryo-preserved cultures of strains were first grown in liquid YPD media (Yeast extract, 10 g. Peptone, 20 g. Dextrose, 60 g. dissolve in 1 L of distilled water). Cultivation was done aseptically in a sterile 125-ml Erlenmeyer flask filled with 50 ml YPD media and inoculated with 100 μl of cryo-preserved culture. Flasks were incubated in a shaking incubator at 32° C. for 16 h with shaking at 150 rpm. The YPD grown seed cultures (40 ml) were centrifuged at 3,500 rpm for 10 min at 22° C., and the resulting cell pellet was washed and resuspended in tap water. The resuspended cells were used to inoculate the corn mash at the beginning of simultaneous saccharification and fermentation (SSF).

### Corn Mash:

[0685] Industrially prepared corn mash liquefied with Avantec® Amp (commercially available enzyme from Novozymes A/S containing an alpha-amylase and a protease) was obtained from an ethanol plant. The mash contained 34.5% dried solids as measured by Mettler-Toledo HB43-S moisture balance. The mash was supplemented with 3 ppm of antibiotic LACTROL™ and its pH was adjusted to 5.0 prior to use in SSF.

### Simultaneous Saccharification and Fermentation (SSF):

[0686] All fermentations were carried out in 125-ml baffled flasks with screw caps having a 0.5 mm hole. Flasks were filled with 40-50 g corn mash and inoculated with resuspended seed culture at 10 million cells per gram of mash. A commercially available glucoamylase enzyme blend (Innova® Excel L) was added to flasks at 0.06% (w/w) of dry corn solids. Fermentation was run for 52 hr, during which samples were taken periodically to analyze the residual peptides and ethanol in the fermented corn mash.

### Peptide Analysis:

[0687] Samples (5 g) removed from flasks during fermentation were transferred into 15 ml conical tubes containing 50 μL of 40% v/v H₂SO₄, vortexed, and centrifuged at 3,500 rpm for 10 min at 22° C. The resulting supernatant was filtered through a 0.2 μm syringe filter. Filtered samples were stored at −20° C. prior to preparation for LCMS analysis. Peptides were derivatized using the AccQTag™ Ultra Derivatization Kit (Waters Inc) according to the following procedure: Mix 10 μl sample with 70 μl AccQ TAG Ultra Borate buffer and 20 μl AccQ TAG Ultra reagent in a microcentrifuge tube. Wait 1 minute and then add 10 μl 100 mM DTT-solution and mix. Incubate for 20 minutes at 60 degrees celcius. Cool samples. Add 5 μl iodoacetamide (500 mM). Wait 30 min for samples to cool in darkness. Derivatized samples are subsequently analyzed on a reverse phase LCMS orbitrap (Thermo Qexactive) in positive ionization scanning mode. Samples are subsequent analyzed on a Accela LC-system equipped with a reverse phase column (ACQUITY UPLC CSH C18 Column, 130A, 1.7 μm, 2.1 mm×150 mm) coupled to a Q Exactive Hybrid Quadrupole-Orbitrap Mass spectrometer (Thermo Scientific). The mass spectrometer was set in positive ionization scanning mode from 200 to 1500 m/z. The LC-system was setup with two mobile phases: MQ-water with 0.1% formic acid (A-eluent) and acetonitrile with 0.1% formic acid (B-eluent). The LC-flow was set to 0.25 ml/min running a standard gradient from 99% A-eluent to 65% A-eluent in 25 minutes. All peaks are annotated (with retention time and exact mass) and integrated in a LCMS peak picking software (GeneData). Identification of peptides is based matching between observed peaks and a) a peptide database with theoretic peptides or b) a database with possible hydrolysis products of a known substrate.

### Ethanol Analysis:

[0688] Samples (5 g) removed from flasks during fermentation were transferred into 15 ml conical tubes containing 50 μL of 40% v/v H₂SO₄, vortexed, and centrifuged at 3,500 rpm for 10 min at 22° C. The resulting supernatant was filtered through a 0.2 μm syringe filter. Filtered samples were stored at 4° C. prior to and during HPLC analysis. Analysis of ethanol was conducted using an HPLC (Agilent 1100/1200 series) machine equipped with a guard column (Bio-Rad, Micro-Guard Cation H+ Cartridge, 30×4.6 mm) and an analytical column (Bio-Rad, Aminex HPX-87H, 300×7.8 mm) using 5 mM Sulfuric Acid as a mobile phase with a flow rate of 0.8 mL/min. Column temperature was maintained at 65° C., and ethanol was detected using a Refractive Index detector at 55° C.

### Results:

[0689] FIG. 2 shows the final ethanol titers of corn mash fermentation by the mutant strains and their corresponding parent strains as listed in Table 8. Deletion of FOTX and FOT2 gens in MBG4994 does not impact fermentation performance of 4994ΔFOT2ΔFOTX compared to MBG4994, likely due to the compensating activity of other oligopeptide transporters encoded by OPT1, OPT2 and WGL114w. The triple deletion of genes encoding for oligopeptide transporters (OPT1, OPT2 and YGL114w) has a greater negative impact on ethanol fermentation kinetics and final titer of Ethanol Red® (ER) than the corresponding knockout strain of MBG4994. As shown in FIG. 2, the final ethanol titer with 4994ΔOPT1ΔOPT2Δygl114w strain is higher than the ERΔOPT1ΔOPT2Δygl114w. The difference in kinetics and final ethanol titer between the latter two strains is attributed to the presence of FOTX and FOT2 genes in MBG4994 and 4994ΔOPT1ΔOPT2Δygl114w. The additional deletion of FOTX and FOT2 in 4994ΔOPT1ΔOPT2Δygl114w strains further slows down fermentation kinetics and reduces the final ethanol titer to a level closer to that of ERΔOPT1ΔOPT2Δygl114w strain, suggesting that FOT2 and FOTX improve fermentation performance by enabling yeast to access and uptake more amino nitrogen during corn mash fermentation.

[0690] FIGS. 3 and 4 show the residual tripeptide and residual tetrapeptide, respectively, after 29 h fermentation using industrially prepared corm mash with the strains listed in Table 8. After 29 h fermentation, Ethanol Red® (ER) has greater residual tri- and tetrapeptides when compared to MBG4994, indicating that MBG4994 can uptake more tri- and tetrapeptides during corn mash fermentation. Deletion of FOTX and FOT2 in MBG4994 leads to increased residual tri- and tetrapeptides similar to the residual tri- and tetrapeptides levels with Ethanol Red® (ER). Uptake of tri- and tetrapeptides by MBG4994 is less impacted than Ethanol Red® (ER) when OPT1, OPT2 and ygl114w genes are deleted, which may be attributed to compensating peptide uptake activities from the Fot2 and Fotx transporters. Additional deletion of the FOT2 and FOTX genes to the MBG4994-triple knockout strain (4994ΔOPT1ΔOPT2Δygl114w) resulted in the yeast strain 4994ΔOPT1ΔOPT2Δygl114wΔFOT2ΔFOTX that exhibits a phenotype (i.e. inability to uptake tri- and tetrapeptides) similar to that of Ethanol Red® (ER) triple deletion strain (ERΔOPT1ΔOPT2Δygl114w), suggesting that FOT2 and FOTX genes improve the uptake of tri- and tetrapeptides and provide MBG4994 access to an expanded range of peptides that leads to improved fermentation performance.

### Example 6: Impact of Expression of Amino Acid/Auxin Permeases FOTX and FOT2 in Recombinant Yeast Strains on Ethanol Fermentation

[0691] This example describes the evaluation of recombinant yeast strains containing one or more heterologous genes encoding an Amino Acid/Auxin Permease (AAAP) encoded by FOTX or FOT2 which are involved in amino nitrogen uptake and metabolism. Particularly, the impact on ethanol final ethanol titer during ethanol fermentation with an industrially prepared corn mash is compared among the yeast strains listed in Table 9.

TABLE 9

| Strains | Description |
|---|---|
| MBG4994 | Parent strain |
| ER | Ethanol Red ® (ER; Fermentis/Lesaffre, USA) |
| ER::FOT2 A | Ethanol Red ® (ER) expressing FOT2 with S2P, K39E, H232L, I324V |
| ER::FOT2 B | Ethanol Red ® (ER) expressing FOT2 with A11V, E22V, N481D |
| ER::FOT2 C | Ethanol Red ® (ER) expressing FOT2 with I128N, N208D, K311E |
| ER::FOTX A | Ethanol Red ® (ER) expressing FOTX with V41I, L413L, T442S, W445C |

### Seed Culture:

[0692] Cryo-preserved cultures of strains were first grown in liquid YPD media (Yeast extract, 10 g; Peptone, 20 g; Dextrose, 60 g; dissolved in 1 L of distilled water). Cultivation was done aseptically in a sterile 125-ml Erlenmeyer flask filled with 50 ml YPD media and inoculated with 100 μl of cryo-preserved culture. Flasks were incubated in a shaking incubator at 32° C. for 16 h with shaking at 150 rpm. The YPD grown seed cultures (40 ml) were centrifuged at 3,500 rpm for 10 min at 22° C., and the resulting cell pellet was washed and resuspended in tap water. The resuspended cells were used to inoculate the corn mash at the beginning of simultaneous saccharification and fermentation (SSF).

### Corn Mash:

[0693] Industrially prepared corn mash liquefied with Avantec® Amp (commercially available enzyme from Novozymes A/S containing an alpha-amylase and a protease) was obtained from an ethanol plant. The mash contained 34.5% dried solids as measured by Mettler-Toledo HB43-S moisture balance. The mash was supplemented with 3 ppm of antibiotic LACTROL™ and its pH was adjusted to 5.0 prior to use in SSF.

### Simultaneous Saccharification and Fermentation (SSF):

[0694] Fermentations were carried out in 125-ml baffled flasks with screw caps having a 0.5 mm hole. Flasks were filled with 40-50 g corn mash and inoculated with resuspended seed culture at 10 million cells per gram of mash. A commercially available glucoamylase enzyme blend (Innova® Excel L) was added to flasks at 0.06% (w/w) of dry corn solids. Fermentation was run for 53 hr, during which samples were taken periodically to analyze ethanol in the fermented corn mash.

### Ethanol Analysis

[0695] Samples (5 g) removed from flasks during fermentation were transferred into 15 ml conical tubes containing 50 μL of 40% v/v H₂SO₄, vortexed, and centrifuged at 3,500 rpm for 10 min at 22° C. The resulting supernatant was filtered through a 0.2 μm syringe filter. Filtered samples were stored at 4° C. prior to and during HPLC analysis. Analysis of ethanol was conducted using an HPLC (Agilent 1100/1200 series) machine equipped with a guard column (Bio-Rad, Micro-Guard Cation H+Cartridge, 30×4.6 mm) and an analytical column (Bio-Rad, Aminex HPX-87H, 300×7.8 mm) using 5 mM Sulfuric Acid as a mobile phase with a flow rate of 0.8 mL/min. Column temperature was maintained at 65° C., and ethanol was detected using a Refractive Index detector at 55° C.

### Results:

[0696] FIG. 5 shows the final ethanol titers after 53 h fermentation of industrially prepared corn mash by the mutant strains and their corresponding parent strains as listed in Table 9. MBG4994 produced higher ethanol titer than Ethanol Red® (ER), and expressing FOTX or FOT2 in Ethanol Red® (ER) leads to higher ethanol titer compared to the Ethanol Red® (ER) parent strain, demonstrating expression of Amino Acid/Auxin Permeases FOTX or FOT2 improves the performance of yeast during corn mash ethanol fermentation.

### Example 7: Efficient Utilization of Amino Nitrogen by Yeast Enables Significant Urea Reduction in Corn Mash Fermentations without Impacting Ethanol Yield

[0697] This example describes the evaluation of yeast strains MBG4994 (which expresses FOTX and FOT2) compared to Ethanol Red® (ER; which lacks expression of FOTX and FOT2) in corn mash fermentations prepared without any proteases with varied exogenous nitrogen (i.e. urea) concentrations. Particularly, the impact of limited nitrogen availability on final ethanol titer in a corn mash fermentation is studied.

### Seed Culture:

[0698] Cryo-preserved cultures of strains were first grown in liquid YPD media (Yeast extract, 10 g. Peptone, 20 g. Dextrose, 60 g. dissolve in 1 L of distilled water). Cultivation was done aseptically in a sterile 125-ml Erlenmeyer flask filled with 50 ml YPD media and inoculated with 100 μl of cryo-preserved culture. Flasks were incubated in a shaking incubator at 32° C. for 16 h with shaking at 150 rpm. The YPD grown seed cultures (40 ml) were centrifuged at 3,500 rpm for 10 min at 22° C., and the resulting cell pellet was washed and resuspended in tap water. The resuspended cells were used to inoculate the corn mash at the beginning of simultaneous saccharification and fermentation (SSF).

Corn mash:

[0699] Industrially prepared corn mash samples liquefied with either Avantec® Amp (commercially available liquefaction enzyme containing an alpha-amylase and a protease) or Liquozyme® LpH (commercially available liquefaction enzyme containing an alpha-amylase and no protease) were obtained from ethanol plants. The mash samples contained 34-35% dried solids as measured by Mettler-Toledo HB43-S moisture balance. The mash was supplemented with 2 ppm of antibiotic LACTROL™ and its pH was adjusted to 5.0 prior to use in SSF. The mash prepared using Liquozyme® LpH (here referred to as LpH) was augmented with 0, 200, 400, and 800 ppm urea, whereas the mash prepared with Avantec® Amp was not supplemented with any urea.

### Simultaneous Saccharification and Fermentation (SSF):

[0700] All fermentations were carried out in 15-ml flip-cap tubes with caps having a 0.5 mm hole. Tubes were filled with 4-5 g corn mash and inoculated with resuspended seed culture at 10 million cells per gram of mash. A commercially available glucoamylase enzyme blend (Spirizyme® Excel) was added to flasks at 0.04% (w/w) of dry corn solids. Fermentation was run for 68 hr. Samples were taken after 68 hours of fermentation to analyze ethanol in the fermented corn mash.

### Ethanol Analysis:

[0701] To each sample, 50 μL of 40% v/v H₂SO₄ was added to the corn mash. Samples were vortexed and centrifuged at 3,500 rpm for 10 min at 22° C. The resulting supernatant was filtered through a 0.2 μm syringe filter. Filtered samples were stored at 4° C. prior to and during HPLC analysis. Analysis of ethanol was conducted using an HPLC (Agilent 1100/1200 series) machine equipped with a guard column (Bio-Rad, Micro-Guard Cation H+Cartridge, 30×4.6 mm) and an analytical column (Bio-Rad, Aminex HPX-87H, 300×7.8 mm) using 5 mM Sulfuric Acid as a mobile phase with a flow rate of 0.8 mL/min. Column temperature was maintained at 65° C., and ethanol was detected using a Refractive Index detector at 55° C.

### Results:

[0702] FIG. 7 illustrates the final ethanol titers of Ethanol Red® (ER) and MBG4994 after 68 h fermentation in corn mash with varied urea concentrations. Results show MBG4994 ethanol yield is not impacted as significantly as Ethanol Red® (ER) by urea reduction. MBG4994 requires up to 50% less urea compared to Ethanol Red® reach maximum ethanol titers. The higher ethanol yield at low urea concentrations compared to Ethanol Red® (ER) suggests the Amino Acid/Auxin Permease (AAAP) FOT genes in MBG4994 allow access to an expanded range of amino nitrogen.

[0703] Following Applicant's discovery above that yeast expression of Amino Acid/Auxin Permeases FOT2 and FOTX provides improved nitrogen uptake and fermentation performance, experiments in the following Examples were conducted to demonstrate performance on a collection of yeast expressing numerous of other Amino Acid/Auxin Permeases.

### Example 8: Construction of Yeast Strains Expressing Various Amino Acid/Auxin Permeases

[0704] This example describes the construction of yeast cells containing various heterologous Amino Acid/Auxin Permeases under control of an S. cerevisiae RPL18B promoter (SEQ ID NO: 547). Three pieces of DNA containing the promoter, gene and terminator were designed to allow for homologous recombination between the three DNA fragments and into the XII-5 locus of the yeast Ethanol Red® (ER; as described in Mikkelsen et al., 2012, Metabolic Engineering 14: 104-111). The resulting strain has one RPL18B promoter containing fragment (left), one gene containing fragment (middle) and one PRM9 terminator (SEQ ID NO: 548) fragment (right) integrated into the S. cerevisiae genome at the XII-5 locus.

Construction of the promoter-containing fragment (left fragment)

[0705] A plasmid containing a synthetic, sequence-verified nucleotide insertion containing 500 bp homology to the XII-5 site followed by the S. cerevisiae promoter RPL18B was synthesized by Thermo Fisher Scientific and designated ‘HP18 plasmid’. To generate linear DNA for transformation into yeast, the ‘HP18 plasmid’ DNA was PCR amplified using primers 1230077 and 1224107 (below) that anneal to the 5′ and 3′ ends of the insertion DNA in ‘HP18 plasmid’. Following thermocycling, the PCR reaction products were cleaned using the NucleoSpin Gel and PCR clean-up kit (Machery-Nagel). The resulting linear DNA was designated HP18 (SEQ ID NO: 549).

1230077:
(SEQ ID NO: 550)
5′-CTGCTGTAAGCAGCAGCAC-3′
1224107:
(SEQ ID NO: 551)
5′-TTTGTTTTTTGTTTTCTTCTAATTGATTTTTTCTTTCTATTTCC-3′

Construction of the FOT-containing fragments (middle fragments)

[0706] Synthetic linear uncloned DNA containing the 3′ 50 bp of the S. cerevisiae RPL18B promoter, a codon-optimized fungal oligopeptide transporter, and 50 bp of S. cerevisiae PRM9 terminator were synthesized by Thermo Fisher Scientific. The nucleotide sequence of the 50 bp of the S. cerevisiae RPL18B promoter and 50 bp of S. cerevisiae PRM9 terminator are shown below:

50 bp of the S. cerevisiae RPL18B promoter:
(SEQ ID NO: 552)
5′-ACCAAAGGAAATAGAAAGAAAAAATCAATTAGAAGAAAACAAAAAAC
AAA-3′
50 bp of S. cerevisiae PRM9 terminator:
(SEQ ID NO: 553)
5′-ACAGAAGACGGGAGACACTAGCACACAACTTTACCAGGCAAGGTATT
TGA-3′

[0707] Construction of the terminator containing fragment (right fragment) A plasmid containing a synthetic, sequence-verified nucleotide insertion containing the S. cerevisiae PRM9 terminator followed by 500 bp homology to the XII-5 site was synthesized by Thermo Fisher Scientific and designated ‘TH7 plasmid’. To generate linear DNA for transformation into yeast, the ‘TH7 plasmid’ DNA was PCR amplified using primers 1221746 and 1230078 (below) that anneal to the 5′ and 3′ ends of the insertion DNA in ‘TH7 plasmid’. Following thermocycling, the PCR reaction products were cleaned using the NucleoSpin Gel and PCR clean-up kit (Machery-Nagel). The resulting linear DNA was designated TH7 (SEQ ID NO: 554).

1221746:
(SEQ ID NO: 555)
5′-ACAGAAGACGGGAGACACTAG-3′
1230078:
(SEQ ID NO: 556
5′-TTTCGTTAGATTCTGTATCCCTAAATAACTC-3′

Integration of the Left, Middle, and Right Fragments to Generate Yeast Strains with a Heterologous Fungal Oligopeptide Transporter Under Control of the RPL18B Promoter

[0708] The yeast Ethanol Red® (ER) was transformed with the left, middle and right integration fragments described above. Each transformation contained HP18, one synthetic DNA encoding an Amino Acid/Auxin Permease, and TH7. Equimolar amounts of the three linear DNAs were included for each transformation with 100 ng of the largest DNA (the middle, AAAP-containing fragment). To aid homologous recombination of the left, middle, and right fragments at the genomic XII-5 site, a plasmid pMLBA635 containing Mad7 and guide RNA specific to XII-5 (FIG. 8). These four components were transformed into the into S. cerevisiae strain Ethanol Red® (ER) following a yeast electroporation protocol (See, Thompson et al. 1998, Yeast, 14(6): 565-71). Transformants were selected on YPD+clonNAT to select for transformants that contain the CRISPR/Mad7 plasmid pMLBA635. Transformants were picked using a Q-pix Colony Picking System (Molecular Devices) to inoculate one well of 96-well plate containing YPD+clonNAT media (Yeast extract, 10 g. Peptone, 20 g. Dextrose, 20 g., clonNAT 0.1 g, dissolve in 1 L of distilled water). The plates were grown for 2 days then glycerol was added to 20% final concentration and the plates were stored at −80° C. until needed. Integration of the specific AAAP construct was verified by PCR with locus specific primers and subsequent sequencing. Sequence verified isolates were hit-picked to a new plate and glycerol stocks prepared as above. The resulting strains are shown in Table 10.

TABLE 10
AAAP-expressing S. cerevisiae Ethanol Red ® (ER)
strains with RPL18B promoter.

| | | | Coding | AAAP |
|---|---|---|---|---|
| | | Gene | SEQ ID | SEQ ID |
| Strain ID | Source Organism | reference | NO. | NO. |
| S660-C07 | Torulaspora | CEP25277.1 | 78 | 163 |
| | microellipsoides | (FOT2) | | |
| S660-F07 | Torulaspora | CEP25277.1 | 78 | 163 |
| | microellipsoides | (FOT2) | | |
| S662-E07 | Torulaspora | CEP25276.1 | 79 | 164 |
| | microellipsoides | (FOTX) | | |
| S662-F07 | Torulaspora | CEP25276.1 | 79 | 164 |
| | microellipsoides | (FOTX) | | |
| S661-D05 | Zygosaccharomyces | A0A212MGL7 | 322 | 432 |
| | bailii | | | |
| S661-E05 | Zygosaccharomyces | A0A212MGL7 | 322 | 432 |
| | bailii | | | |
| S666-A12 | Zygosaccharomyces | EFPBZZ5FS | 323 | 433 |
| | kombuchaensis | | | |
| S666-B12 | Zygosaccharomyces | EFPBZZ5FS | 323 | 433 |
| | kombuchaensis | | | |
| S658-A02 | Lachancea fermentati | A0A1G4MGH9 | 324 | 434 |
| S658-B02 | Lachancea fermentati | A0A1G4MGH9 | 324 | 434 |
| S662-D02 | Zygotorulaspora | Zflorentina | 325 | 435 |
| | florentina | | | |
| S662-C02 | Zygotorulaspora | Zflorentina | 325 | 435 |
| | florentina | | | |
| S666-D06 | Zygosaccharomyces | A0A1Q3ALJ6 | 326 | 436 |
| | rouxii | | | |
| S666-F06 | Zygosaccharomyces | A0A1Q3ALJ6 | 326 | 436 |
| | rouxii | | | |
| S658-C06 | Zygosaccharomyces | C5DZS0 | 327 | 437 |
| | rouxii | | | |
| S658-E06 | Zygosaccharomyces | C5DZS0 | 327 | 437 |
| | rouxii | | | |
| S658-B04 | Lachancea cidri | EFP6BNQFG | 328 | 438 |
| S658-D04 | Lachancea cidri | EFP6BNQFG | 328 | 438 |
| S666-A03 | Zygosaccharomyces | EFPC3P5VG | 329 | 439 |
| | pseudobailii | | | |
| S666-C03 | Zygosaccharomyces | EFPC3P5VG | 329 | 439 |
| | pseudobailii | | | |
| S664-G11 | Torulaspora delbrueckii | EFPBZ6NGV | 330 | 440 |
| S664-B12 | Torulaspora delbrueckii | EFPBZ6NGV | 330 | 440 |
| S659-B06 | Lachancea meyersii | A0A1G4JE54 | 331 | 441 |
| S659-F06 | Lachancea meyersii | A0A1G4JE54 | 331 | 441 |
| S661-B04 | Lachancea nothofagi | A0A1G4JL69 | 332 | 442 |
| S661-C04 | Lachancea nothofagi | A0A1G4JL69 | 332 | 442 |
| S666-A02 | Lachancea sp | A0A1G4JPN3 | 334 | 444 |
| S666-H02 | Lachancea sp | A0A1G4JPN3 | 334 | 444 |
| S659-D08 | Lachancea lanzarotensis | A0A0C7N6P2 | 335 | 445 |
| S659-G08 | Lachancea lanzarotensis | A0A0C7N6P2 | 335 | 445 |
| S662-C03 | Lachancea dasiensis | A0A1G4J939 | 336 | 446 |
| S662-F03 | Lachancea dasiensis | A0A1G4J939 | 336 | 446 |
| S658-A05 | Wickerhamiella | EFP5NS7WC | 337 | 447 |
| | domercqiae | | | |
| S658-F05 | Wickerhamiella | EFP5NS7WC | 337 | 447 |
| | domercqiae | | | |
| S664-C11 | Pichia manshurica | EFP1D624N3 | 339 | 449 |
| S664-E11 | Pichia manshurica | EFP1D624N3 | 339 | 449 |
| S665-C10 | Pichia manshurica | EFP1D624N3 | 339 | 449 |
| S665-D08 | Pichia membranifaciens | A0A1E3NDG2 | 340 | 450 |
| S665-E08 | Pichia membranifaciens | A0A1E3NDG2 | 340 | 450 |
| S659-B01 | Candida apicola | EFP47XNK4 | 341 | 451 |
| S659-E01 | Candida apicola | EFP47XNK4 | 341 | 451 |
| S662-E11 | Starmerella bombicola | EFP3SBJ79 | 342 | 452 |
| S662-F11 | Starmerella bombicola | EFP3SBJ79 | 342 | 452 |
| S661-E11 | Starmerella bacillaris | EFP91WKVB | 343 | 453 |
| S661-H11 | Starmerella bacillaris | EFP91WKVB | 343 | 453 |
| S664-C07 | Leucosporidium | A0A1Y2FA00 | 344 | 454 |
| | creatinivorum | | | |
| S664-D07 | Leucosporidium | A0A1Y2FA00 | 344 | 454 |
| | creatinivorum | | | |
| S660-C08 | Rhodotorula graminis | EFP58RS8G | 345 | 455 |
| S660-F08 | Rhodotorula graminis | EFP58RS8G | 345 | 455 |
| S665-C03 | Rhodosporidium | A0A061BKL7 | 346 | 456 |
| | toruloides | | | |
| S665-G03 | Rhodosporidium | A0A061BKL7 | 346 | 456 |
| | toruloides | | | |
| S666-D01 | Rhodotorula sp | EFP5PH7FN | 347 | 457 |
| S666-H01 | Rhodotorula sp | EFP5PH7FN | 347 | 457 |
| S661-A06 | Microbotryum lychnidis | U5H9G8 | 348 | 458 |
| S661-D06 | Microbotryum lychnidis | U5H9G8 | 348 | 458 |
| S665-A02 | Auricularia auricula | EFP7WXHH1 | 349 | 459 |
| S665-F02 | Auricularia auricula | EFP7WXHH1 | 349 | 459 |
| S660-A03 | Jaapia argillacea | A0A067PLG1 | 350 | 460 |
| S660-D03 | Jaapia argillacea | A0A067PLG1 | 350 | 460 |
| S663-C07 | Gloeophyllum odoratum | EFP1CXBWDG | 351 | 461 |
| S663-E07 | Gloeophyllum odoratum | EFP1CXBWDG | 351 | 461 |
| S658-C08 | Trichaptum abietinum | EFP1CJ1MFR | 352 | 462 |
| S658-D08 | Trichaptum abietinum | EFP1CJ1MFR | 352 | 462 |
| S666-A11 | Marasmius oreades | EFP1FJKB6 | 353 | 463 |
| S666-E11 | Marasmius oreades | EFP1FJKB6 | 353 | 463 |
| S659-A11 | Gymnopus alpinus | EFP10Z4WG | 354 | 464 |
| S659-D11 | Gymnopus alpinus | EFP10Z4WG | 354 | 464 |
| S660-B12 | Agrocybe cylindracea | EFPF6M6L | 356 | 466 |
| S660-E12 | Agrocybe cylindracea | EFPF6M6L | 356 | 466 |
| S660-D02 | Psilocybe inquilina | EFP5RRR4 | 357 | 467 |
| S660-F02 | Psilocybe inquilina | EFP5RRR4 | 357 | 467 |
| S662-C10 | Sphaerobolus stellatus | EFP3RL4ZF | 358 | 468 |
| S662-D10 | Sphaerobolus stellatus | EFP3RL4ZF | 358 | 468 |
| S662-A05 | Mycena chlorophos | EFP6C1R0D | 359 | 469 |
| S662-D05 | Mycena chlorophos | EFP6C1R0D | 359 | 469 |
| S663-B09 | Mortierella sossauensis | EFP6MB9TD | 360 | 470 |
| S663-C09 | Mortierella sossauensis | EFP6MB9TD | 360 | 470 |
| S665-D09 | Mortierella | EFP5H88LD | 361 | 471 |
| | longigemmata | | | |
| S665-G09 | Mortierella | EFP5H88LD | 361 | 471 |
| | longigemmata | | | |
| S661-F10 | Calocera viscosa | A0A167S4F3 | 362 | 472 |
| S661-E10 | Calocera viscosa | A0A167S4F3 | 362 | 472 |
| S663-H04 | Fomitopsis palustris | EFP7J2PXT | 363 | 473 |
| S663-D05 | Fomitopsis palustris | EFP7J2PXT | 363 | 473 |
| S662-A01 | Antrodia heteromorpha | EFP4KL0ZJ | 364 | 474 |
| S662-F01 | Antrodia heteromorpha | EFP4KL0ZJ | 364 | 474 |
| S665-A01 | Postia placenta | EFP1D1ZTB3 | 365 | 475 |
| S665-G01 | Postia placenta | EFP1D1ZTB3 | 365 | 475 |
| S660-F04 | Sparassis crispa | EFP47LVGV | 366 | 476 |
| S660-H04 | Sparassis crispa | EFP47LVGV | 366 | 476 |
| S659-A05 | Solicoccozyma terricola | EFP5QPPBF | 367 | 477 |
| S659-B05 | Solicoccozyma terricola | EFP5QPPBF | 367 | 477 |
| S666-F04 | Erythrobasidium | EFP5R5J3V | 368 | 478 |
| | yunnanense | | | |
| S666-H04 | Erythrobasidium | EFP5R5J3V | 368 | 478 |
| | yunnanense | | | |
| S659-A04 | Piloderma croceum | A0A0C3F214 | 369 | 479 |
| S659-H04 | Piloderma croceum | A0A0C3F214 | 369 | 479 |
| S664-B09 | Rhizopogon vinicolor | A0A1B7MIK0 | 370 | 480 |
| S664-C09 | Rhizopogon vinicolor | A0A1B7MIK0 | 370 | 480 |
| S666-C10 | Suillus brevipes | EFPJW9LJ | 371 | 481 |
| S666-D10 | Suillus brevipes | EFPJW9LJ | 371 | 481 |
| S665-D06 | Boletus edulis | EFP17GTQR | 372 | 482 |
| S665-G06 | Boletus edulis | EFP17GTQR | 372 | 482 |
| S658-D07 | Phlebopus portentosus | EFP3FV4PC | 373 | 483 |
| S658-E07 | Phlebopus portentosus | EFP3FV4PC | 373 | 483 |
| S661-C02 | Pisolithus tinctorius | EFP3S84PX | 374 | 484 |
| S661-E02 | Pisolithus tinctorius | EFP3S84PX | 374 | 484 |
| S658-A03 | Serpula lacrymans | F8P1Y9 | 375 | 485 |
| S658-B03 | Serpula lacrymans | F8P1Y9 | 375 | 485 |
| S659-B12 | Coniophora arida | EFP1CSBN5K | 376 | 486 |
| S659-C12 | Coniophora arida | EFP1CSBN5K | 376 | 486 |
| S665-E07 | Fibularhizoctonia sp | A0A167XE77 | 377 | 487 |
| S665-F07 | Fibularhizoctonia sp | A0A167XE77 | 377 | 487 |
| S661-C07 | Umbelopsis versiformis | EFP9DLH6H | 378 | 488 |
| S661-F07 | Umbelopsis versiformis | EFP9DLH6H | 378 | 488 |
| S659-C03 | Basidiobolus | EFP2R5KD1 | 379 | 489 |
| | meristosporus | | | |
| S659-E03 | Basidiobolus | EFP2R5KD1 | 379 | 489 |
| | meristosporus | | | |
| S660-B01 | Sphaerobolus stellatus | A0A0C9VC65 | 380 | 490 |
| S660-A01 | Sphaerobolus stellatus | A0A0C9VC65 | 380 | 490 |
| S661-C03 | Botrytis paeoniae | EFP486ZN4 | 383 | 493 |
| S661-E03 | Botrytis paeoniae | EFP486ZN4 | 383 | 493 |
| S663-A04 | Monilinia fructicola | EFP2NB535 | 384 | 494 |
| S663-E04 | Monilinia fructicola | EFP2NB535 | 384 | 494 |
| S666-A07 | Rutstroemia sp | A0A2S7QZC8 | 385 | 495 |
| S666-E07 | Rutstroemia sp | A0A2S7QZC8 | 385 | 495 |
| S665-G10 | Pichia manshurica | EFP1D626D2 | 387 | 497 |
| S664-C08 | Candida ethanolica | EFP6BJ66Q | 388 | 498 |
| S664-F08 | Candida ethanolica | EFP6BJ66Q | 388 | 498 |
| S658-B01 | Pichia kluyveri | EFP8D4WVW | 389 | 499 |
| S658-E01 | Pichia kluyveri | EFP8D4WVW | 389 | 499 |
| S659-F09 | Saccharomycopsis | EFP5ND1MZ | 390 | 500 |
| | malanga | | | |
| S661-F01 | Schwanniomyces | EFP6RN4MJ | 391 | 501 |
| | occidentalis | | | |
| S661-E01 | Schwanniomyces | EFP6RN4MJ | 391 | 501 |
| | occidentalis | | | |
| S659-A10 | Zygoascus meyerae | EFP3X7JM3 | 392 | 502 |
| S659-B10 | Zygoascus meyerae | EFP3X7JM3 | 392 | 502 |
| S665-F05 | Meliniomyces variabilis | A0A2J6SB57 | 393 | 503 |
| S665-G05 | Meliniomyces variabilis | A0A2J6SB57 | 393 | 503 |
| S663-B12 | Cadophora malorum | EFPCQ67N | 394 | 504 |
| S663-D12 | Cadophora malorum | EFPCQ67N | 394 | 504 |
| S664-F01 | Aureobasidium | EFP8FPW55 | 395 | 505 |
| | melanogenum | | | |
| S664-G01 | Aureobasidium | EFP8FPW55 | 395 | 505 |
| | melanogenum | | | |
| S659-A07 | Daldinia fissa | EFPCJGTM | 396 | 506 |
| S659-C07 | Daldinia fissa | EFPCJGTM | 396 | 506 |
| S660-B06 | Monilinia fructicola | EFP2NB1FW | 397 | 507 |
| S660-H06 | Monilinia fructicola | EFP2NB1FW | 397 | 507 |
| S660-G09 | Trypethelium eluteriae | EFP177TX2 | 398 | 508 |
| S660-F09 | Trypethelium eluteriae | EFP177TX2 | 398 | 508 |
| S664-A04 | Cladonia uncialis | EFPBZC0R5 | 399 | 509 |
| S664-C04 | Cladonia uncialis | EFPBZC0R5 | 399 | 509 |
| S660-A10 | Mollisia sp | EFP7W35XH | 400 | 510 |
| S660-E10 | Mollisia sp | EFP7W35XH | 400 | 510 |
| S665-A04 | Pseudeurotium bakeri | EFPD1N9R | 401 | 511 |
| S665-C04 | Pseudeurotium bakeri | EFPD1N9R | 401 | 511 |
| S662-D06 | Acidomyces | A0A150US26 | 402 | 512 |
| | richmondensis | | | |
| S662-E06 | Acidomyces | A0A150US26 | 402 | 512 |
| | richmondensis | | | |
| S664-H05 | Hamigera striata | EFP2N99N4 | 403 | 513 |
| S664-C06 | Hamigera striata | EFP2N99N4 | 403 | 513 |
| S661-D09 | Phaeoacremonium scolyti | EFP5DHTC7 | 404 | 514 |
| S661-G09 | Phaeoacremonium scolyti | EFP5DHTC7 | 404 | 514 |
| S658-E10 | Ophiostoma quercus | EFP5DH8ZN | 405 | 515 |
| S658-F10 | Ophiostoma quercus | EFP5DH8ZN | 405 | 515 |
| S660-A11 | Talaromyces variabilis | EFP1FVKFW | 406 | 516 |
| S660-H11 | Talaromyces variabilis | EFP1FVKFW | 406 | 516 |
| S663-C01 | Talaromyces sp | EFP6L97GW | 407 | 517 |
| S663-D01 | Talaromyces sp | EFP6L97GW | 407 | 517 |
| S664-D02 | Talaromyces | EFP3DBP5B | 408 | 518 |
| | calidicanius | | | |
| S664-E02 | Talaromyces | EFP3DBP5B | 408 | 518 |
| | calidicanius | | | |
| S663-F02 | Rasamsonia argillacea | EFP21MPCH | 409 | 519 |
| S663-H02 | Rasamsonia argillacea | EFP21MPCH | 409 | 519 |
| S659-B02 | Byssochlamys | EFP1WBVL | 410 | 520 |
| | spectabilis | | | |
| S659-F02 | Byssochlamys | EFP1WBVL | 410 | 520 |
| | spectabilis | | | |
| S662-D09 | Penicillium rolfsii | EFPC79LRM | 411 | 521 |
| S662-E09 | Penicillium rolfsii | EFPC79LRM | 411 | 521 |
| S660-G05 | Penicillium limosum | EFP644KQ2 | 412 | 522 |
| S660-C05 | Penicillium limosum | EFP644KQ2 | 412 | 522 |
| S662-B12 | Penicillium | EFP2TGWZ1 | 413 | 523 |
| | simplicissimum | | | |
| S662-C12 | Penicillium | EFP2TGWZ1 | 413 | 523 |
| | simplicissimum | | | |
| S664-C03 | Penicillium | EFP7HP1ZJ | 414 | 524 |
| | parviverrucosum | | | |
| S664-E03 | Penicillium | EFP7HP1ZJ | 414 | 524 |
| | parviverrucosum | | | |
| S658-B12 | Penicillium sclerotiorum | EFP2T1JMT | 415 | 525 |
| S658-C12 | Penicillium sclerotiorum | EFP2T1JMT | 415 | 525 |
| S664-C10 | Aspergillus cervinus | EFP3BBR7 | 417 | 527 |
| S664-D10 | Aspergillus cervinus | EFP3BBR7 | 417 | 527 |
| S662-G04 | Talaromyces variabilis | EFP44W473 | 418 | 528 |
| S658-C11 | Rhytidhysteron rufulum | EFP3B6HRS | 419 | 529 |
| S658-D11 | Rhytidhysteron rufulum | EFP3B6HRS | 419 | 529 |
| S666-F09 | Leptoxyphium fumago | EFP6PKS23 | 420 | 530 |
| S666-G09 | Leptoxyphium fumago | EFP6PKS23 | 420 | 530 |
| S666-A08 | Cladosporium | EFP9CL953 | 421 | 531 |
| | cladosporioides | | | |
| S666-C08 | Cladosporium | EFP9CL953 | 421 | 531 |
| | cladosporioides | | | |
| S663-B08 | Penicillium bilaiae | EFP6T2LDH | 422 | 532 |
| S663-C08 | Penicillium bilaiae | EFP6T2LDH | 422 | 532 |
| S661-B12 | Gamarada debralockiae | EFPB8Z9TK | 423 | 533 |
| S661-H12 | Gamarada debralockiae | EFPB8Z9TK | 423 | 533 |
| S662-D08 | Pseudocercospora pini | EFP2M1M0N | 424 | 534 |
| S662-E08 | Pseudocercospora pini | EFP2M1M0N | 424 | 534 |
| S664-C05 | Taphrina flavorubra | EFP3T7DNC | 426 | 536 |
| S664-F05 | Taphrina flavorubra | EFP3T7DNC | 426 | 536 |
| S666-B05 | Ustilaginaceae sp | EFP43RBTX | 427 | 537 |
| S666-C05 | Ustilaginaceae sp | EFP43RBTX | 427 | 537 |
| S658-A09 | Ustilago filiformis | EFP78NDPQ | 428 | 538 |
| S658-B09 | Ustilago filiformis | EFP78NDPQ | 428 | 538 |
| S663-H09 | Pseudozyma tsukubaensis | EFP3W0ZV1 | 429 | 539 |
| S663-A10 | Pseudozyma tsukubaensis | EFP3W0ZV1 | 429 | 539 |
| S663-H10 | Ustilago williamsii | EFP2N7HVQ | 430 | 540 |
| S663-D11 | Ustilago williamsii | EFP2N7HVQ | 430 | 540 |
| S663-F05 | Yarrowia deformans | EFP5QXTQG | 431 | 541 |
| S663-G05 | Yarrowia deformans | EFP5QXTQG | 431 | 541 |

### Example 9: Construction of Yeast Strains Expressing Amino Acid/Auxin Permeases Under Control of Native Promoter

[0709] This example describes the construction of yeast cells containing a heterologous Amino Acid/Auxin Permease under control of its native promoter. Three pieces of DNA containing the promoter, gene and terminator were designed to allow for homologous recombination between the three DNA fragments and into the XII-5 locus of the yeast Ethanol Red® (ER; as described in Mikkelsen et al., 2012, Metabolic Engineering 14: 104-111). The resulting strain has one native promoter containing fragment (left), one gene containing fragment (middle) and one PRM9 terminator (SEQ ID NO: 548) fragment (right) integrated into the S. cerevisiae genome at the XII-5 locus.

### Construction of the Promoter Containing Fragment (Left Fragment)

[0710] Synthetic linear uncloned DNA containing 400 bp of homology to the XII-5 site, the 1000 bp 5′ of the Fot gene of interest, and the first 60 bp of the coding region for the AAAP gene Fot2 or FotX was synthesized by Thermo Fisher Scientific. The fragment for the Fot2 gene was designated “Fot2_native_promo” (SEQ ID NO: 557) and the fragment for the FotX gene was designated “FotX_native_promo” (SEQ ID NO: 558).

Construction of the AAAP-containing fragments (middle fragments)

[0711] The synthetic linear uncloned DNA containing the 3′ 50 bp of the S. cerevisiae RPL18B promoter, a codon-optimized encoding sequence of the AAAP, and 50 bp of S. cerevisiae PRM9 terminator synthesized by Thermo Fisher Scientific as described in Example 8 were used as PCR templates. PCR primers shown below were designed to anneal at the start codon of the respective AAAP genes, resulting in removal of the 50 bp of the S. cerevisiae RPL18B promoter homology on the fragment. Following thermocycling, the PCR reaction products were cleaned using the NucleoSpin Gel and PCR clean-up kit (Machery-Nagel). The resulting fragments were designated “Fot2 ORF” and “FotX ORF.”

Primers for Fot2 ORF:
(SEQ ID NO: 559)

| | |
|---|---|
| 1230028: | 5′-ATGTCAAAGCTCATCCCTATCGCTAG-3′ |

(SEQ ID NO: 560)

| | |
|---|---|
| 1230233: | 5′-TCAAATACCTTGCCTGGTAAAGTTGTGTG-3′ |

Primers for FotX ORF:
(SEQ ID NO: 561)

| | |
|---|---|
| 1230029: | 5′-ATGTCAAAACTTGTCCCTATCGCTAGTC-3′ |

(SEQ ID NO: 560)

| | |
|---|---|
| 1230233: | 5′-TCAAATACCTTGCCTGGTAAAGTTGTGTG-3′ |

Integration of Fragments to Generate Yeast Strains Expressing AAAP with Native Promoter

[0712] The left and middle fragments above were transformed into the yeast Ethanol Red® (ER) together with the terminator-containing right fragment from Example 8. The transformation for the strain expressing the AAAP Fot2 contained three linear DNAs consisting of Fot2_native_promo, Fot2 ORF, and TH7. The transformation for the strain expressing FotX contained three linear DNAs consisting of FotX_native_promo, FoX ORF, and TH7. Equimolar amounts of the three linear DNAs were included for each transformation with 100 ng of the largest DNA (middle fragment). To aid homologous recombination of the left, middle, and right fragments at the genomic XII-5 site, plasmid pMLBA635 (FIG. 8) containing Mad7 and guide RNA specific to XII-5 was also used in the transformation. These four components were transformed into the into S. cerevisiae strain Ethanol Red® (ER) following a yeast electroporation protocol (See, Thompson et al. Yeast. 1998 Apr. 30; 14(6):565-71). Transformants were selected on YPD+clonNAT to select for transformants that contain the CRISPR/Mad7 plasmid pMLBA635. Transformants were picked using a Q-pix Colony Picking System (Molecular Devices) to inoculate 1 well of 96-well plate containing YPD+clonNAT media. The plates were grown for 2 days then glycerol was added to 20% final concentration and the plates were stored at −80° C. until needed. Integration of the specific AAAP construct was verified by PCR with locus specific primers and subsequent sequencing, and then hit-picked to a new plate with glycerol stocks prepared as above. Two sequence verified clones were kept for each AAAP of interest, as shown in Table 11.

TABLE 11
Yeast strains expressing Amino Acid/Auxin Permeases
Fot2 and FotX under control of native promoter

| | | | | Coding | AAAP |
|---|---|---|---|---|---|
| | | | | SEQ ID | SEQ ID |
| Strain ID | Promoter | FOT gene | terminator | NO. | NO. |
| S667-C02 | FOT2 | Fot2 | PRM9 | 78 | 163 |
| S667-D02 | FOT2 | Fot2 | PRM9 | 78 | 163 |
| S667-A01 | FOTX | FotX | PRM9 | 79 | 164 |
| S667-H01 | FOTX | FotX | PRM9 | 79 | 164 |

### Example 10: Growth Evaluation of Yeast Strains Expressing a Heterologous Amino Acid/Auxin Permease

[0713] Strains described in Examples 8 and 9 were evaluated for growth in Yeast Nitrogen Base without amino acids and ammonium sulfate (Sigma) supplemented with 20 g/L glucose and 12 mg PAN/L zein hydrolysate (primary amino nitrogen was quantified using Megazyme Primary Amino Nitrogen Assay Kit, according to the manufacturer's instructions). The Growth Profiler (Enzyscreen) is an incubator that can simultaneously control growth conditions, take images of clear-bottom multi-titer growth plates, and measure cell density over time, and was used to evaluate strain growth of AAAP strains. To prepare the strains for evaluation of growth in the PAN containing media, yeast strains were grown for 24 hours in YPD medium with 2% glucose, 30° C. and 300 RPM. A 10 uL inoculum of yeast was added to Growth Profiler plates containing 250 uL of medium (YNB+2% Glucose+12 mg/L PAN). Plates were secured in the Growth Profiler and grown at 250 RPM, 30° C. for 24 hours. Time intervals between each photo was 10 minutes. Slope of each strain was calculated by taking the ratio of rise (green value) over run (time (hours)) during the time period of interest. Each 96-well plate was tested in triplicate and each 96-well plate contained four wells of the Ethanol Red® (ER) parent strain as the control. The resulting data for the slope of the growth curve between 2 hours and 6 hours of growth was averaged for all strains expressing the same AAAP under control of the same promoter.

[0714] As shown in Table 12 and FIGS. 9A-9C, the resulting data indicate that nearly 90% of the tested strains expressing an Amino Acid/Auxin Permease showed improved mean slope over 2-6 hr compared to control strain Ethanol Red® (ER).

TABLE 12
The mean slope and mean standard error based on the G-
value from Growth Profiler testing of Ethanol Red ® (ER)
strains expressing an AAAP in YNB + 2% Glucose +
12 mg/L PAN media. Column “N” reports the number
of tests conducted for the given promoter-AAAP combination
(or Ethanol Red ® (ER) without expressing AAAP
gene as the negative control).

| | | Mean (Slope | Std Error (Slope |
|---|---|---|---|
| Promoter_Expressed AAAP | N | (2-6 hr)) | (2-6 hr)) |
| pRPL18B_EFPBZ6NGV | 6 | 9.545 | 0.232 |
| pRPL18B_EFP8D4WVW | 6 | 9.546 | 0.270 |
| pRPL18B_EFP5ND1MZ | 3 | 9.563 | 0.188 |
| pRPL18B_EFP3SBJ79 | 6 | 9.776 | 0.382 |
| pRPL18B_EFPBZC0R5 | 6 | 9.800 | 0.173 |
| pRPL18B_A0A212MGL7 | 6 | 9.800 | 0.189 |
| pRPL18B_A0A167S4F3 | 6 | 9.833 | 0.219 |
| pRPL18B_A0A1G4MGH9 | 6 | 9.839 | 0.154 |
| pRPL18B_A0A061BKL7 | 6 | 9.843 | 0.121 |
| pRPL18B_EFP177TX2 | 6 | 9.850 | 0.084 |
| pRPL18B_A0A0C9VC65 | 6 | 9.874 | 0.143 |
| pRPL18B_EFP644KQ2 | 6 | 9.921 | 0.149 |
| Ethanol Red ® Control (ER) | 36 | 9.943 | 0.088 |
| pRPL18B_EFP7WXHH1 | 6 | 9.982 | 0.160 |
| pRPL18B_EFP6BNQFG | 6 | 9.984 | 0.128 |
| pRPL18B_EFP6RN4MJ | 6 | 9.994 | 0.132 |
| pRPL18B_A0A167XE77 | 6 | 10.001 | 0.159 |
| pRPL18B_EFP5NS7WC | 6 | 10.005 | 0.249 |
| pRPL18B_EFP78NDPQ | 6 | 10.057 | 0.126 |
| pRPL18B_EFP47XNK4 | 6 | 10.075 | 0.205 |
| pRPL18B_EFP5QPPBF | 6 | 10.095 | 0.192 |
| pRPL18B_EFPCQ67N | 6 | 10.103 | 0.196 |
| pRPL18B_EFP43RBTX | 6 | 10.116 | 0.133 |
| pRPL18B_EFPD1N9R | 6 | 10.134 | 0.263 |
| pRPL18B_EFP5PH7FN | 6 | 10.146 | 0.131 |
| pRPL18B_EFP6T2LDH | 6 | 10.146 | 0.244 |
| pRPL18B_A0A1Q3ALJ6 | 6 | 10.155 | 0.240 |
| pRPL18B_A0A0C3F214 | 6 | 10.156 | 0.119 |
| pRPL18B_EFP1D1ZTB3 | 6 | 10.194 | 0.135 |
| pRPL18B_F8P1Y9 | 6 | 10.203 | 0.051 |
| pRPL18B_A0A1G4JPN3 | 6 | 10.214 | 0.223 |
| pFOTX_FotX | 6 | 10.228 | 0.157 |
| pRPL18B_EFP6PKS23 | 6 | 10.247 | 0.138 |
| pRPL18B_EFP2T1JMT | 6 | 10.261 | 0.164 |
| pRPL18B_A0A1E3NDG2 | 6 | 10.268 | 0.255 |
| pRPL18B_EFPJW9LJ | 6 | 10.282 | 0.208 |
| pRPL18B_A0A0C7N6P2 | 6 | 10.286 | 0.166 |
| pRPL18B_EFP6BJ66Q | 6 | 10.337 | 0.124 |
| pRPL18B_EFP1CJ1MFR | 6 | 10.338 | 0.134 |
| pRPL18B_Zflorentina | 6 | 10.374 | 0.200 |
| pRPL18B_EFP47LVGV | 6 | 10.378 | 0.106 |
| pRPL18B_EFPF6M6L | 6 | 10.387 | 0.099 |
| pFOT2_Fot2 | 6 | 10.393 | 0.242 |
| pRPL18B_FotX | 6 | 10.398 | 0.190 |
| pRPL18B_EFP2NB535 | 6 | 10.448 | 0.172 |
| pRPL18B_EFP3S84PX | 6 | 10.452 | 0.089 |
| pRPL18B_EFP5RRR4 | 6 | 10.463 | 0.126 |
| pRPL18B_EFP5R5J3V | 6 | 10.471 | 0.239 |
| pRPL18B_EFP486ZN4 | 6 | 10.478 | 0.066 |
| pRPL18B_EFP58RS8G | 6 | 10.482 | 0.092 |
| pRPL18B_A0A1B7MIK0 | 6 | 10.508 | 0.152 |
| pRPL18B_EFP9CL953 | 6 | 10.513 | 0.127 |
| pRPL18B_U5H9G8 | 6 | 10.520 | 0.249 |
| pRPL18B_A0A1G4JL69 | 6 | 10.529 | 0.095 |
| pRPL18B_EFP3B6HRS | 6 | 10.541 | 0.075 |
| pRPL18B_EFP7W35XH | 6 | 10.547 | 0.068 |
| pRPL18B_EFP2NB1FW | 6 | 10.558 | 0.079 |
| pRPL18B_EFP1FVKFW | 6 | 10.562 | 0.066 |
| pRPL18B_EFP1D624N3 | 9 | 10.567 | 0.180 |
| pRPL18B_EFP1CXBWDG | 6 | 10.607 | 0.236 |
| pRPL18B_EFP21MPCH | 6 | 10.607 | 0.243 |
| pRPL18B_EFP17GTQR | 6 | 10.610 | 0.090 |
| pRPL18B_EFP5H88LD | 6 | 10.635 | 0.146 |
| pRPL18B_EFP9DLH6H | 6 | 10.637 | 0.152 |
| pRPL18B_EFP2R5KD1 | 6 | 10.650 | 0.101 |
| pRPL18B_EFP3X7JM3 | 6 | 10.652 | 0.123 |
| pRPL18B_EFP5DH8ZN | 6 | 10.655 | 0.131 |
| pRPL18B_A0A2S7QZC8 | 6 | 10.658 | 0.107 |
| pRPL18B_EFP2N7HVQ | 6 | 10.663 | 0.205 |
| pRPL18B_EFP1D626D2 | 3 | 10.674 | 0.151 |
| pRPL18B_C5DZS0 | 6 | 10.680 | 0.099 |
| pRPL18B_A0A1Y2FA00 | 6 | 10.683 | 0.170 |
| pRPL18B_A0A150US26 | 6 | 10.688 | 0.208 |
| pRPL18B_EFP3FV4PC | 6 | 10.694 | 0.100 |
| pRPL18B_A0A1G4J939 | 6 | 10.698 | 0.234 |
| pRPL18B_EFPBZZ5FS | 6 | 10.709 | 0.202 |
| pRPL18B_EFP7HP1ZJ | 6 | 10.717 | 0.178 |
| pRPL18B_EFP5DHTC7 | 6 | 10.721 | 0.239 |
| pRPL18B_EFP3T7DNC | 6 | 10.722 | 0.159 |
| pRPL18B_A0A1G4JE54 | 6 | 10.725 | 0.051 |
| pRPL18B_A0A2J6SB57 | 6 | 10.728 | 0.175 |
| pRPL18B_Fot2 | 6 | 10.735 | 0.093 |
| pRPL18B_EFP8FPW55 | 6 | 10.738 | 0.138 |
| pRPL18B_EFP44W473 | 3 | 10.740 | 0.259 |
| pRPL18B_EFPCJGTM | 6 | 10.748 | 0.052 |
| pRPL18B_EFP3RL4ZF | 6 | 10.750 | 0.188 |
| pRPL18B_EFP2N99N4 | 6 | 10.750 | 0.185 |
| pRPL18B_EFP1CSBN5K | 6 | 10.757 | 0.098 |
| pRPL18B_EFP3DBP5B | 6 | 10.758 | 0.179 |
| pRPL18B_EFP91WKVB | 6 | 10.763 | 0.175 |
| pRPL18B_EFP1WBVL | 6 | 10.771 | 0.085 |
| pRPL18B_EFP3BBR7 | 6 | 10.801 | 0.131 |
| pRPL18B_EFP10Z4WG | 6 | 10.811 | 0.064 |
| pRPL18B_EFP6C1R0D | 6 | 10.831 | 0.200 |
| pRPL18B_A0A067PLG1 | 6 | 10.831 | 0.065 |
| pRPL18B_EFPC79LRM | 6 | 10.832 | 0.248 |
| pRPL18B_EFP6MB9TD | 6 | 10.868 | 0.185 |
| pRPL18B_EFP1FJKB6 | 6 | 10.883 | 0.164 |
| pRPL18B_EFP2TGWZ1 | 6 | 10.893 | 0.174 |
| pRPL18B_EFPC3P5VG | 6 | 10.931 | 0.168 |
| pRPL18B_EFP4KL0ZJ | 6 | 10.945 | 0.208 |
| pRPL18B_EFP7J2PXT | 6 | 10.955 | 0.213 |
| pRPL18B_EFP3W0ZV1 | 6 | 10.962 | 0.203 |
| pRPL18B_EFP2M1M0N | 6 | 10.972 | 0.137 |
| pRPL18B_EFPB8Z9TK | 6 | 10.985 | 0.203 |
| pRPL18B_EFP5QXTQG | 6 | 10.987 | 0.172 |
| pRPL18B_EFP6L97GW | 6 | 11.164 | 0.213 |

### Example 11: Construction of Yeast Strains Expressing Various Amino Acid/Auxin Permeases in a Yeast with Deleted Endogenous Oligopeptide Transporters

[0715] This example describes the construction of yeast cells containing a heterologous Amino Acid/Auxin Permease (AAAP) under control of either an S. cerevisiae RPL18B promoter or under control of the native AAAP promoter in an Ethanol Red® (ER) strain deleted for the three endogenous S. cerevisiae oligopeptide transporters opt1, opt2, and ygl114w.

[0716] A subset of the same DNA pieces and transformation methods were used as for Examples 8 and 9 with the recipient strain being ERΔOPT1ΔOPT2Δygl114w. Transformants were picked using a Q-pix Colony Picking System (Molecular Devices) to inoculate 1 well of 96-well plate containing YPD+clonNAT media. The plates were grown for 2 days then glycerol was added to 20% final concentration and the plates were stored at −80° C. until needed. Integration of the specific AAAP construct into ERΔOPT1ΔOPT2Δygl114w was verified by PCR with locus specific primers and subsequent sequencing. Isolates were hit-picked to a new plate and glycerol stocks prepared as above. The resulting strains are shown in Table 13.

TABLE 13
AAAP-expressing S. cerevisiae Ethanol Red ® (ER) strains
with deletion of endogenous oligopeptide transporters

| | | | Gene | Coding | AAAP |
|---|---|---|---|---|---|
| Strain ID | Promoter | Source Organism | reference | SEQ ID NO. | SEQ ID NO. |
| S667-F10 | RPL18B | Cladosporium cladosporioides | EFP9CL953 | 421 | 531 |
| S667-G10 | RPL18B | Cladosporium cladosporioides | EFP9CL953 | 421 | 531 |
| S667-A11 | RPL18B | Lachancea sp | A0A1G4JPN3 | 334 | 444 |
| S667-C11 | RPL18B | Lachancea sp | A0A1G4JPN3 | 334 | 444 |
| S667-E04 | RPL18B | Leptoxyphium fumago | EFP6PKS23 | 420 | 530 |
| S667-H04 | RPL18B | Leptoxyphium fumago | EFP6PKS23 | 420 | 530 |
| S668-D01 | RPL18B | Marasmius oreades | EFP1FJKB6 | 353 | 463 |
| S668-E01 | RPL18B | Marasmius oreades | EFP1FJKB6 | 353 | 463 |
| S667-D03 | RPL18B | Rhodotorula sp | EFP5PH7FN | 347 | 457 |
| S667-C09 | RPL18B | Rutstroemia sp | A0A2S7QZC8 | 385 | 495 |
| S667-F09 | RPL18B | Rutstroemia sp | A0A2S7QZC8 | 385 | 495 |
| S667-A12 | RPL18B | Suillus brevipes | EFPJW9LJ | 371 | 481 |
| S667-B12 | RPL18B | Suillus brevipes | EFPJW9LJ | 371 | 481 |
| S667-A07 | RPL18B | Ustilaginaceae sp | EFP43RBTX | 427 | 537 |
| S667-C07 | RPL18B | Ustilaginaceae sp | EFP43RBTX | 427 | 537 |
| S667-B06 | RPL18B | Zygosaccharomyces kombuchaensis | EFPBZZ5FS | 323 | 433 |
| S667-C06 | RPL18B | Zygosaccharomyces kombuchaensis | EFPBZZ5FS | 323 | 433 |
| S668-C02 | RPL18B | Zygosaccharomyces kombuchaensis | EFPBZZ5FS | 323 | 433 |
| S668-F02 | RPL18B | Zygosaccharomyces kombuchaensis | EFPBZZ5FS | 323 | 433 |
| S667-D05 | RPL18B | Zygosaccharomyces pseudobailii | EFPC3P5VG | 329 | 439 |
| S667-E05 | RPL18B | Zygosaccharomyces pseudobailii | EFPC3P5VG | 329 | 439 |
| S667-A08 | RPL18B | Zygosaccharomyces rouxii | A0A1Q3ALJ6 | 326 | 436 |
| S667-G08 | RPL18B | Zygosaccharomyces rouxii | A0A1Q3ALJ6 | 326 | 436 |
| S668-C03 | FotX | Torulaspora microellipsoides | FotX | 79 | 164 |
| S668-G03 | FotX | Torulaspora microellipsoides | FotX | 79 | 164 |
| S668-G04 | Fot2 | Torulaspora microellipsoides | Fot2 | 78 | 163 |
| S668-H04 | Fot2 | Torulaspora microellipsoides | Fot2 | 78 | 163 |

### Example 12: Growth Evaluation of Yeast Strains Expressing a Heterologous Amino Acid/Auxin Permease

[0717] Strains constructed in the ERΔOPT1ΔOPT2Δygl114 strain background of Example 11 were evaluated for growth in Yeast Nitrogen Base without amino acids and ammonium sulfate (Sigma) supplemented with 20 g/L glucose and 12 mg PAN/L zein hydrolysate (primary amino nitrogen was quantified using Megazyme Primary Amino Nitrogen Assay Kit, according to the manufacturer's instructions) in the Growth Profiler (Enzyscreen) as described in Example 10. The resulting data for the slope of the growth curve between 2 hours and 6 hours of growth was averaged for all strains expressing the same AAAP under control of the same promoter.

[0718] As shown in Table 14 and FIG. 10, the resulting data indicate that all the tested strains expressing an Amino Acid/Auxin Permease in the ERΔOPT1ΔOPT2Δygl114 strain background showed improved mean slope over 2-6 hr compared to control strain ERΔOPT1ΔOPT2Δygl114 strain not expressing the AAAP.

TABLE 14
The mean slope and mean standard error based on the G-
value from Growth Profiler testing of ERΔOPT1ΔOPT2Δygl114
strains expressing an AAAP in YNB + 2% Glucose +
12 mg/L PAN media. Column “N” reports the number
of tests conducted for the given promoter-AAAP combination
(or ERΔOPT1ΔOPT2Δygl114 without expressing AAAP
gene as the negative control).

| | | Mean (Slope | Std Error Slope |
|---|---|---|---|
| promoter and FOT | N | (2-6 hr)) | (2-6 hr)) |
| none | 36 | 9.133 | 0.109 |
| pRPL18B_A0A2S7QZC8 | 6 | 9.347 | 0.138 |
| pRPL18B_EFPC3P5VG | 6 | 9.398 | 0.136 |
| pRPL18B_EFP9CL953 | 6 | 9.556 | 0.126 |
| pRPL18B_EFP1FJKB6 | 6 | 9.561 | 0.114 |
| pRPL18B_A0A1G4JPN3 | 6 | 9.835 | 0.124 |
| pRPL18B_EFP6PKS23 | 6 | 9.852 | 0.138 |
| pFOT2_Fot2 | 6 | 9.863 | 0.130 |
| pRPL18B_EFP43RBTX | 6 | 9.975 | 0.151 |
| pRPL18B_EFPJW9LJ | 6 | 10.000 | 0.138 |
| pRPL18B_A0A1Q3ALJ6 | 6 | 10.034 | 0.120 |
| pRPL18B_EFPBZZ5FS | 12 | 10.053 | 0.134 |
| pFOTX_FotX | 6 | 10.079 | 0.124 |
| pRPL18B_EFP5PH7FN | 3 | 10.321 | 0.138 |

1-31. (canceled)

32: A yeast cell comprising a heterologous polynucleotide encoding an Amino Acid/Auxin Permease (AAAP).

33: The yeast cell of claim 32, wherein the Amino Acid/Auxin Permease (AAAP) comprises one or more motifs selected from:
Motif A:
(SEQ ID NO: 542)
L-[I, L]-T-T-D-[I, V]-L-G-P;
Motif B:
(SEQ ID NO: 543)
[V, I]-[F, Y]-[A, S]-[F, Y, W]-G-G;
Motif C:
(SEQ ID NO: 544)
E-[M, L]-[A, K, R]-[H, K, N, R]-P-X-[D, E]-F;
and
Motif D:
(SEQ ID NO: 545)
A-X-X-L-Y-[G, S]-N-[I, V]-[A, G, S]-[I, L, V]-
K-X-X-Y.

34: The yeast cell of claim 32, wherein the Amino Acid/Auxin Permease (AAAP) comprises Motif A: L-[I,L]-T-T-D-[I,V]-L-G-P (SEQ ID NO: 542).

35: The yeast cell of claim 32, wherein Motif A is Motif A2: L-I-T-T-D-I-L-G-P (SEQ ID NO: 546).

36: The yeast cell of claim 32, wherein the Amino Acid/Auxin Permease (AAAP) comprises Motif D: A-X-X-L-Y-[G,S]-N-[I,V]-[A,G,S]-[I,L,V]-K-X-X-Y (SEQ ID NO: 545).

37: The yeast cell of claim 32, wherein the Amino Acid/Auxin Permease (AAAP) comprises Motif B: [V,I]-[F,Y]-[A,S]-[F,Y,W]-G-G (SEQ ID NO: 543) and Motif C: E-[M,L]-[A,K,R]-[H,K,N, R]-P-X-[D,E]-F (SEQ ID NO: 544).

38: The yeast cell of claim 32, wherein the heterologous polynucleotide encoding the Amino Acid/Auxin Permease (AAAP) is a recombinant modification introduced into the cell.

39: The yeast cell of claim 32, wherein the heterologous polynucleotide encoding the transporter is operably linked to a promoter that is foreign to the polynucleotide.

40: The yeast cell of claim 32, wherein the heterologous polynucleotide encoding the transporter is introduced into the cell using non-recombinant breeding techniques.

41: The yeast cell of claim 32, wherein the Amino Acid/Auxin Permease (AAAP) has at least 80% sequence identity to the amino acid sequence of any one SEQ ID NOs: 163, 164 and 432-541.

42: The yeast cell of claim 32, wherein further comprises a disruption to an endogenous transporter gene.

43: The yeast cell of claim 32, with the proviso that the Amino Acid/Auxin Permease is not from the Torulaspora microellipsoides AAAP of SEQ ID NO: 163 or the AAAP of SEQ ID NO: 164.

44: The yeast cell of claim 32, wherein the cell is capable of maintaining the same yield of a fermentation product with less supplemental nitrogen during fermentation, when compared to an otherwise identical fermenting organism lacking the heterologous polynucleotide encoding the transporter.

45: The yeast cell of claim 32, wherein the cell is capable of increased tripeptides or tetrapeptides, when compared to an otherwise identical fermenting organism lacking the heterologous polynucleotide encoding the transporter.

46: The yeast cell of claim 32, wherein the cell is a recombinant cell.

47: The yeast cell of claim 32, wherein the cell further comprises a heterologous polynucleotide encoding a glucoamylase, alpha-amylase, or protease.

48: The yeast cell of claim 32, wherein the cell comprises multiple copies of the heterologous polynucleotide encoding the transporter.

49: The yeast cell of claim 32, wherein the cell is a non-recombinant cell.

50: The yeast cell of claim 32, wherein the cell is a Saccharomyces, Rhodotorula, Schizosaccharomyces, Kluyveromyces, Pichia, Issatchenkia, Hansenula, Rhodosporidium, Candida, Torulaspora, Zygosaccharomyces, Yarrowia, Lipomyces, Cryptococcus, or Dekkera sp. cell.

51: The yeast cell of claim 32, wherein the cell is a Saccharomyces cerevisiae cell.

52: A composition comprising the yeast strain of claim 32, and one or more naturally occurring and/or non-naturally occurring components, such as components are selected from the group consisting of: surfactants, emulsifiers, gums, swelling agents, and antioxidants.

53: A method of producing a fermentation product from a starch-containing or cellulosic-containing material comprising:
(a) saccharifying the starch-containing or cellulosic-containing material; and
(b) fermenting the saccharified material of step (a) with the yeast cell of claim 32.

54: The method of claim 53, comprising liquefying the starch-containing material at a temperature above the initial gelatinization temperature in the presence of an alpha-amylase prior to saccharification.

55: The method of claim 54, comprising adding a protease in liquefaction.

56: The method of claim 53, wherein fermentation and saccharification are performed simultaneously in a simultaneous saccharification and fermentation (SSF).

57: The method of claim 53, comprising recovering the fermentation product from the fermentation.

58: The method of claim 53, wherein the fermentation product is ethanol.

The application's sequence listing, which the Patent Office published only in electronic form, follows.

SEQUENCE LISTING (561 sequences)

SEQ ID NO: 1 - DNA, 1902 bp, Saccharomyces cerevisiae
atgtcgtcgtcgaagtctctatacgaactgaaagacttgaaaaatagctccacagaaatacatgccacggggcaggataatgaaattgaatatttcgaaacaggctccaatgaccgtccatcctcacaacctcatttaggttacgaacagcataacacttctgccgtgcgtaggtttttcgactcctttaaaagagcggatcagggtccacaggatgaagtagaagcaacacaaatgaacgatcttacgtcggctatctcaccttcttctagacaggctcaagaactagaaaaaaatgaaagttcggacaacataggcgctaatacaggtcataagtcggactcgctgaagaaaaccattcagcctagacatgttctgatgattgcgttgggtacgggtatcggtactgggttattggtcggtaacggtaccgcgttggttcatgcgggtccagctggactacttattggttacgctattatgggttctatcttgtactgtattattcaagcatgtggtgaaatggcgctagtgtatagtaacttgactggtggctacaatgcataccccagtttccttgtggatgatggttttgggtttgcagtcgcttgggtttattgtttgcaatggctgtgtgtgtgtcctctggaattggtgaccgcatccatgactatcaaatattggacgacatctgtgaacccggatgtgttcgtcattattttctatgttttggtgattactattaatattttcggtgctcgtggttatgcagaagctgagttcttcttcaactgttgcaaaattttgatgatgactgggttcttcattcttggtattatcatcgatgttggtggcgctggtaatgatggttttattggtggtaaatactggcacgatccgggcgctttcaatggtaaacatgccattgacagatttaaaggtgttgctgcaacattagtgactgctgcttttgcctttggtggttcagagtttattgccatcaccactgcagaacaatctaatccaagaaaggccattccaggtgcggccaaacaaatgatctacagaatcttattcctattcttggctaccattattctactgggtttcttggtgccatacaattccgatcaattattgggttctaccggtggtggtactaaagcctcgccatatgtcattgctgttgcatcccacggtgtccgtgtcgtcccacacttcattaacgccgttattctactttccgtgctgtccatggctaactcctccttctactccagtgctcgtttatttttaactctatccgagcaaggttacgctcctaaggttttctcctacatcgacagagccggtagaccattgattgccatgggtgtttctgcattgtttgccgttattgccttctgtgctgcatctcccaaggaagaacaagttttcacttggttattggccatttctggtttgtctcagcttttcacatggactgccatttgtttatcccatcttagatttagaagagccatgaaagtccaagggagatctcttggagaattgggtttcaaatctcaaactggtgtttggggatctgcctacgcttgcattatgatgattttaattcttattgcccaattttgggtcgctatcgcccccattggtgaaggtaagctggatgcacaagcctttttcgaaaactacttggctatgccaatcttgattgcactttatgtcggctacaaggtctggcacaaggattggaaactgttcatcagggcagacaagatcgacctagattctcatagacaaatctttgatgaagaattaatcaagcaagaagacgaagaatatagggaacgtttgaggaacggaccttattggaaaagggtcgttgccttctggtgttaa

SEQ ID NO: 2 - DNA, 1830 bp, Saccharomyces cerevisiae
atgctatcttcagaagattttggatcttctgggaaaaaggaaacttctcctgattcgatatcgatacgttcctttagtgccgggaataatttccaatcatcatcaagtgagaaaacttattctaagcaaaaatccgggagtgacaaacttatacatagatttgcggattcattcaaaagagccgagggtagcactacaagaactaagcaaataaatgaaaatacgtctgatttagaggatggcgttgagtctatcacgtcggattccaagttgaaaaagtccatgaagtcgcgccatgttgtcatgatgtctttagggacaggtattgggactggtcttttggtagctaatgcaaaaggtctacattacggtggtcctgctgcgctaataattggttacatcttggtttctttcgagacgtacttcatgatccaagctgcaggtgagatggcggtaacctatccgactttaccagcaaatttcaacgcatactcctccatattcatttccaaatcatttggattcgccacagtatggctttactgtttccaatggctaacggttttgcctttagagttaataaccgcgtctatgactattcaatttgggaatgataaaataaatccggacatttatattcttattttctatgttttcttagtattcattcatttcttcggtgtaaaagcctatggtgaaacggaattcatcttcaattgctgtaaaattttaatgattgcaggtttcattattctttctattgttatcaactgtggtggggccggaaatgacggttatatcggggccacttattggcataatccaggtgcttttgcaggtgacacatcgattggtaggttcaaaaacgtttgctatattttagttactgcttacttctcctttggtggtatggaattatttgcactaagtgttcaggaacagtctaaccctagaaaatctactccggtggcagccaagagaagcatttatcgtatcgttgtgatttatcttttgactatgatcctcattggattcaatgttccatataatgatgaccaactaatgggcgcaggcggatccgctacacatgcatctccctatgtcttagccgcttctattcacggtgtgaaaattgttccacatattatcaacgctgttattttgatttctgtggtttcagtggcaaattcctctttgtatgctggtccaagactgatttgctctttggcccaacaaggctacgcacccaagtttttagattacgttgacagagagggcaggcccttgagagctcttattgtgtgttgcgttttcggcgtcattgcttttgttgcagcttcatcaaaggaagagatcgtgtttacatggttagcagctatcgcaggcttgagtgaattattcacatggacttccataatgttgtcccatctgcgattcagacaagcaatgaaagtacagggaaggtctctagacgagttgggatacaaggccacaacagggatttggggttccatatacggtgtcttttttaatattttagtctttgttgcccaattttgggtagcattggcccccttaggtaatgggggcaaatgcgatgcggaatccttctttcaaaattatttagcttttccaatatggttggccttttacttcggatatatggtttacaaccgagattttacgctattaaatcccctcgacaagattgaccttgacttccacagacgcatttatgatccagagctaatgagacaagaggacgaagaaaataaagaaaaactaaggaatatgtctttgatgagaaaagcttatcatttctggtgttaa

SEQ ID NO: 3 - DNA, 1701 bp, Saccharomyces cerevisiae
atggaaaaaagtgcagagtttgaagtaacagactctgctttatataataacttcaatacatcaacaacagcttcactaactccggagattaaggaacattctgaggaatctcgcaatgggttagttcacagattcgtcgactcattcagaagagccgaaagccaacgtttagaagaagacaatgacttggaggatggtaccaaatcgatgaaatctaataaccacttaaaaaagtcaatgaaatctagacatgttgtaatgatgtctttaggtacagggataggaacaggtcttctagttgccaacgccaaaggtttgagtcttgcaggcccggggtctttagtcatcggttacgttatggtgtccttcgtcacgtattttatggtccaagcggctggtgagatgggtgtcacttatccgacgcttccaggtaacttcaatgcatacaattcaatctttatttcaaagtcgtttgggttcgcgaccacttggttattttgcattcagtggttaactgtgctaccgttggaattgattacttcttccatgaccgtcaagtactggaatgacacaattaatgctgatgtattcattgtcattttctatgtgtttttattgtttatccacttttttggtgttaaggcatacggtgaaacggaatttatcttcaattcctgtaagatattgatggttgcaggattcattattttatcagtcgtcatcaattgtgggggagccggtgtggacggctatattggcggcaaatattggcgcgaccctggttcatttgcagaaggcagcggtgccactcgtttcaaagggatatgttatattctagtatctgcatatttctccttcggtggtattgaattatttgttctttccatcaatgagcagtctaaccctagaaaatccactcctgtagccgcgaagagaagtgtatatcgtattttgatcatttatttgctgacaatgattctaattgggttcaatgttcctcacaataacgatcaattgatgggttccggtggctccgcaacgcacgcttcaccatatgtcttggcagcctctattcacaaggttagggtcatcccccatatcattaatgctgttattttgatatcagtcatctctgttgcgaactctgccctttatgccgcaccgagattaatgtgttccttggctcaacagggctatgctccaaaatttttgaactatattgatagggagggaagacctttaagggccttggtagtgtgctctcttgttggtgtcgttggcttcgtcgcctgttctccacaggaagagcaagcatttacatggttggcagccattgcaggtttgagtgaacttttcacatggtcaggcattatgctttcacacattcgattcagaaaagcgatgaaagtccaaggaagatcacttgatgaagtcggctataaggccaataccggtatatggggttcatactatggggtttttttcaatatgcttgtctttatggcccaattttgggtcgcactgtctccaataggaaatggcggaaagtgtgatgctcaggcattcttcgagagttatctggctgccccgctatggatattcatgtatgttggatacatggtttacaaaagagattttacctttttaaacccactggacaagatcgacttggactttcatagaagaggtttacgaccctga

SEQ ID NO: 4 - DNA, 1992 bp, Saccharomyces cerevisiae
atgacgcttggtaatagacgccatgggcggaataatgagggaagctctaatatgaatatgaatcgtaacgaccttgacgatgtttcccattacgagatgaaggaaatacaaccaaaggaaaaacaaattggctctatagaaccggaaaatgaagtagaatattttgaaaaaacagtggaaaaaaccattgaaaatatggaatatgaaggtgaacatcatgcatcttacttacggaggttcattgactcgtttagaagagcggaaggctcgcatgcaaattccccagactcgagcaactctaatgggactactcctatatccacaaaagattccagctctcaattggacaatgagttgaatcggaagagctcatacatcactgttgatggtattaaacagtcaccacaagaacaagaacagaaacaagaaaatttgaaaaagagtataaagccccgtcatacggtgatgatgtccctagggactggtattggtactggtttgctggtcggtaactccaaagttttgaacaatgcaggtccgggtggtttgatcattggttatgctattatgggtagttgtgtttactgtattattcaagcttgtggtgaattagcggttatatacagtgatttgattggtggatttaatacatatcctttgtttttggtcgaccctgcacttggcttttctgttgcttggcttttttgcttacaatggctatgtgtttgtcctctagaattggtcactgcatccatgactatcaaatattggacgacatctgtgaacccggatgttttcgttgttatcttctacgtactaatcgttgttatcaacgtttttggagctaagggttatgcagaggcagatttcttcttcaattgttgtaaaattctgatgatagttggatttttcattctcgccattattattgattgtggtggtgcaggtaccgatagttacataggtagcaaatattggcgtgatcccggagccttccgtggtgatacacccatccagaggttcaaaggtgtcgttgccacatttgtcacagcagcgttcgcctttggtatgagtgaacagctggctatgactgccagtgaacaatccaatccaagaaaggctattccatcggcggcaaagaaaatgatttatagaattctgtttgtgttcttggcgtctttaacgttagttggtttccttgtaccttacacctcagatcaattgctaggggccgcaggttcagccactaaagcgtcgccctacgtcatcgctgtctcctctcatggtgttcgtgtggttcctcatttcataaacgctgtcatcctgttgtctgttctttccgttgctaacggtgccttctataccagttctcgtattttgatgtcgttggccaaacaaggtaatgcacccaaatgtttcgattacatcgatagggaaggtagacctgctgctgctatgcttgtcagtgcattatttggtgtcattgcattctgtgcctcatctaaaaaggaagaggacgttttcacctggttgttagcaatctccggtttgtctcaattattcacgtggattaccatttgtttgtctcacattaggtttagaagagctatgaaagtgcaaggaaggtccttaggagaggttggttataaatctcaagtcggtgtctgggggtcggcttacgctgtccttatgatggtgttagctttaatcgcccaattttgggttgccattgccccaattggtggaggaggtaagttaagtgcccaatcattttttgagaattatttggctatgccaatctggattgctttatacatcttttacaaagtttggaaaaaagattggagtttattcattcccgctgataaagtagacttagtttctcatagaaacatctttgatgaagaattattaaaacaagaagatgaagaatataaagagagattaagaaacggaccatactggaaaagagttcttgatttctggtgttaa

SEQ ID NO: 5 - DNA, 1860 bp, Saccharomyces cerevisiae
atggacgatagtgtcagtttcattgccaaagaggccagtccagcacaatattcgcacagtttgcatgaaagaacacacagtgaaaaacaaaagagagactttacaataacagaaaaacaagatgaggtatctggacaaacagcggagcctcgaaggacggacagcaaatccatattacagaggaaatgcaaagaattcttcgactcttttaaaaggcagctgccaccagaccgtaattccgaactagagtcccaagaaaaaaacaacctgacaaagtcgatcaaatctcgtcacttagtcatgatcagtctcggtaccggtataggtactggtttactggtcggtaatggtcaggtgctgggaacagctggtcctgccgggttagtccttggttacggaatagcatcgatcatgctttactgtatcatccaagcggcaggcgagttaggtctctgttatgcaggactaaccggcaattacaccagatatccttctattttagtcgacccttcgttgggttttgcagtttctgtggtttacaccattcaatggctaactgttctgcccttacaattggtcactgcggcaatgacagttaagtactggacgagtgtaaatgcagacatctttgttgccgtggttttcgtttttgtaattatcattaatctatttgggtccagaggctatgctgaagccgagttcattttcaattcctgtaagatattgatggtaatcggattcgtcattctggcgattatcatcaattgtgggggtgcaggtgacagaagatacatcggtgctgagtactggcacaatcctggtccatttgcccacggtttcaaaggtgtatgtacggttttctgttatgctgcattcagctacggtggaattgaagttctacttctatctgccgctgagcaggaaaacccaacaaaatctattcccaatgcctgcaaaaaagtggtataccgtattctgctgatttacatgctcaccaccattttggtttgctttcttgttccatacaacagtgacgaattattagggtctagtgactcctctggatcccatgcctccccatttgtcattgctgttgcatcacatggtgtcaaagttgtgcctcactttataaatgctgttattttgatttctgtcatttctgttgcaaactcttcgttatattctgggccaagattgttattatcattggcagaacaaggcgtcttacctaaatgcttagcatatgttgatagaaacggcaggcctttactttgtttttttgtttcccttgtctttggatgcattgggtttgtagccactagtgacgctgaagaacaggttttcacctggttattggcaatttctagtctttcgcaattatttatctggatgtcaatgtccttgtcacatataagatttagagatgccatggcaaagcaaggtcgttcgatgaacgaagttggatacaaagcacaaactggctattggggttcatggcttgcagttttaattgcaatcttcttccttgtgtgccagttctgggtagccatcgcacctgttaatgaacatggaaaacttaacgtcaaagtgtttttccaaaattatttggcaatgcccatcgttttgtttgcctattttggtcacaagatatacttcaaatcatggagcttttggattccagccgaaaaaattgatttggactcacatagaaacatatttgtgtctccatcgcttacagagatcgacaaagttgacgataacgatgatcttaaagagtatgaaaattcagaatcgtcggaaaatccaaacagttcgcgttcaagaaagttttttaagaggatgaccaatttctggtgctaa

SEQ ID NO: 6 - DNA, 1779 bp, Saccharomyces cerevisiae
atgaccgaagactttatttcttctgtcaagcgttcaaatgaggagctgaaggagcgaaaatctaactttggatttgtagaatacaaatccaagcaattaacatcatcctcatcacacaattcaaactcatcgcatcacgatgatgacaaccaacacggcaagaggaatattttccagcgatgtgttgattctttcaagtctcctctggacggctcgttcgacacaagtaatttgaagaggactctgaaaccaaggcacttaatcatgattgccattgggggcagtataggtactggtttgtttgtcggtagtggtaaggcaatcgccgaaggtggtcctcttggtgtcgtcattggttgggctattgcaggctctcaaatcatcgggacgattcatgggctaggtgaaatcacggtgcggtttcccgttgtcggggcctttgccaattacggcacaaggtttttggatccaagtataagttttgttgtttcgaccatatacgtgctacagtggttttttgtattacccttagaaatcattgcggcggcaatgaccgtacagtactggaactcgtctattgaccccgtaatttgggtagccatcttttatgctgttattgtttccataaatttgtttggtgtacgaggttttggggaagcggaatttgcattttccaccataaaagcaataacagtttgcggattcattatattgtgcgttgtcctcatttgcggtggaggtcccgaccacgagttcattggcgccaaatactggcacgaccctggttgtttggccaatgggttcccgggcgttctatctgttcttgttgttgcttcgtattctctcggtggtatagaaatgacgtgcctggcatcaggtgaaacggaccccaaaggcttaccaagtgctatcaagcaagtgttttggaggatcttatttttctttttgatatcactgaccctggtaggattcctggttccatatacaaaccaaaacttactgggtggttcatctgtggacaactcaccttttgtcattgccataaaattgcatcacattaaagccttgccctccatcgtcaatgcggtcatccttatcagtgttttgagtgtaggtaactcctgcatcttcgcttcaagtagaacgttgtgttcgatggcccaccaaggccttattccatggtggtttggttatatcgaccgtgctggtaggccgctggttggcattatggcaaattcactatttggattactagcatttctggtcaaatctggctcgatgtctgaagttttcaattggttaatggccattgccggcctggccacgtgcattgtctggttgagcatcaacctgtcacatatcagatttagactggcgatgaaggctcaagggaagtctctggatgaattagaatttgttagtgctgtcgggatttggggatcagcgtattccgctttaatcaactgtctaatcttgatagctcaattctattgttcactatggcccattggtggctggaccagcggcaaagaaagggctaaaatattttttcaaaattatctgtgtgccttaatcatgttatttatattcatcgtccacaaaatttattacaagtgtcaaacaggcaaatggtggggggttaaggcgttaaaggacatagatttggaaaccgatcgtaaagatatcgacatcgaaatagtcaagcaagaaattgccgaaaagaaaatgtacctagattcccgtccatggtacgtgagacagttccatttctggtgttaa

SEQ ID NO: 7 - DNA, 1806 bp, Saccharomyces cerevisiae
atgagtaatacttcttcgtacgagaagaataatccagataatctgaaacacaatggtattaccatagattctgagtttctaactcaggagccaataaccattccctcaaatggctccgctgtttctattgacgaaacaggttcagggtccaaatggcaagactttaaagattctttcaaaagggtaaaacctattgaagttgatcctaatctttcagaagctgaaaaagtggctatcatcactgcccaaactccattgaagcaccacttgaagaatagacatttgcaaatgattgccatcggtggtgccatcggtactggtctgctggttgggtcaggtactgcactaagaacaggtggtccttcgctactgattggatgggggtctacaggtaccatgatttacgctatggttatggctctgggtgagttggctgttatcttccctatttcgggtgggttcaccacgtacgctaccagatttattgatgagtcctttggttacgctaataatttcaattatatgttacaatggttggttgtgctaccattggaaattgtcgctgcatctattactgtaaatttctggggtacagatccaaagtatagagatgggtttgttgcgttgttttggcttgcaattgttatcatcaatatgtttggtgtcaaaggttatggtgaagcagaattcgtcttttcatttatcaaggtcatcactgttgttgggttcatcatcttaggtatcattctaaactgtggtggtggtccaacaggtggttacattgggggcaagtactggcatgatcctggtgcctttgctggtgacactccaggtgctaaattcaaaggtgtttgttctgtcttcgtcaccgctgccttttcttttgccggttcagaattggttggtcttgctgccagtgaatccgtagagcctagaaagtccgttcctaaggctgctaaacaagttttctggagaatcaccctattttatattctgtcgctattaatggttggtcttttagtcccatacaacgataaaagtttgattggtgcctcctctgtggatgctgctgcttcacccttcgtcattgccattaagactcacggtatcaagggtttgccaagtgttgtcaacgtcgttatcttgattgccgtgttatctgtcggtaactctgccatttatgcatgttccagaacaatggttgccctagctgaacagagatttctgccagaaatcttttcctacgttgaccgtaagggtagaccattggtgggaattgctgtcacatctgcattcggtcttattgcgtttgttgccgcctccaaaaaggaaggtgaagttttcaactggttactagccttgtctgggttgtcatctctattcacatggggtggtatctgtatttgtcacattcgtttcagaaaggcattggccgcccaaggaagaggcttggatgaattgtctttcaaatctcccaccggtgtttggggttcctactgggggttatttatggttattattatgttcattgcccaattctacgttgctctattccccgtgggagattctccaagtgcggaaggtttcttcgaagcttatctatccttcccacttgttatggttatgtacatcggacacaagatctataagaggaattggaagcttttcatcccagcagaaaagatggacattgatacgggtagaagagaagtcgatttagatttgttgaaacaagaaattgcagaagaaaaggcaattatggccacaaagccaagatggtatagaatctggaatttctggtgttaa

SEQ ID NO: 8 - DNA, 1812 bp, Saccharomyces cerevisiae
atgcctagaaacccattgaaaaaggaatattgggcagatgtagttgacggattcaagccggctacttctccagccttcgagaatgaaaaagaatctactacatttgttaccgaactaacttccaaaaccgattctgcatttccattaagtagcaaggattcacctggcataaaccaaaccacaaacgatattacctcttcagatcgcttccgtcgtaatgaagacacagagcaggaagacatcaacaacaccaacctgagtaaagatctatccgtgagacatcttttaactctagctgtcgggggtgcaataggtactggtttatatgtgaatacgggtgctgctttatctacaggtggtccggccagtttagttattgattgggttattatcagtacatgtctttttactgtgattaactctcttggtgagctgtccgctgcttttcccgttgttggtgggttcaatgtttacagtatgcgttttattgagccttcatttgcattcgcagtgaacttaaactatttagcacaatggctagttcttctacccttggaattagtggccgcatctattactataaaatactggaatgataaaattaattccgacgcctgggttgctatcttttatgccaccattgcactggctaatatgttggatgttaagtcatttggtgagaccgaatttgtattgtccatgattaaaatcctctccatcattggctttactatcttaggtattgttttgtcctgtggtggtgggcctcacggcggttacattggtggtaaatactggcatgacccaggcgcttttgtagggcacagctcgggaactcagtttaaaggtttatgttcagtttttgttaccgctgccttttcttattccggtattgaaatgactgctgtctccgctgctgaaagtaaaaatccaagagaaaccattcccaaggcagcaaagagaactttttggctgattaccgcctcttatgtgactatattgactttgattggttgcttggttccatccaatgaccctaggttactaaacggttcaagttcagtggacgctgcctcatctcctctggttatcgcaattgaaaacgggggtattaaaggtctaccatcattaatgaacgccattattttgattgctgttgtttccgtggctaacagtgctgtttatgcatgttcaaggtgtatggtcgccatggctcatattggtaatttaccaaaatttttgaaccgtgttgacaaaaggggtagaccaatgaatgctatcttgttaactttgttttttggtttgctttcctttgtggcagcaagtgataagcaagctgaagtctttacatggttgagtgccttatctggtttatcgacaattttctgctggatggccattaatctttcccatattagatttcgccaagccatgaaagttcaagaaaggtctttagacgaattacccttcatttctcaaactggcgtcaagggatcctggtatggttttatcgttttatttctggttcttatagcatcgttttggacttctctgttcccattaggcggttcaggagccagcgcagaatcattctttgaaggatacttatcctttccaattttgattgtctgttacgttggacataaactgtatactagaaattggactttgatggtgaaactagaagatatggatcttgataccggcagaaaacaagtagatttgactcttcgtagggaagaaatgaggattgagcgagaaacattagcaaaaagatccttcgtaacaagatttttacatttctggtgttga

SEQ ID NO: 9 - DNA, 1752 bp, Saccharomyces cerevisiae
atggatgaatttgaatctaccaaactttcgaaggttcagttttccactagcgtgttaagtacgccttcgaatgaaggaaataatctaatacacagattcaagaactctttcaagcgaaatgattcaccagcgatccaagaaggtttgctgtattcggagctttcagaggaagaaaaaatacaatgggacttagccaaccagccgtataaaaaggtcctagatcaaagacacctgaccatgatagccattggaggtactctagggacgggtcttttcattggtttaggggaatcactagcgtccggacctgcttctttgctaattggtttcttgttggtcggcgcatctatgctctgtgttgttcagtgtggggccgaactttcatgtcagtaccctgtttccggctcctatgcgctgcacgccagtagatttatagacccatcagtcggcttcagtataggaattaactacttattgatgtggctcatatcttaccctagcgagctggtaggatgttcgcttaccatctcttattgggcaccatcggtcaatcctgctgcctgggttgcaatcgcgttcgttttaagcatgctattgaatctttttggggcaagaggctttgcagaatcagagttttatatgtcaattttcaaaattgtggctctattcatttttataattattggtattgttctcattgcaggtggtgggcctgattctactggatacatcggcacgaagtattggcacgatccaggctccttcgctgttcctgttttcaaaaacctctgcaatacttttgtttcggcagcatactcctttagtggtacagaaatggttgttttaaccagcactgaagcaaggagtgtttcctcagtctctcgggcagcgaaaggtacgttctggagaattatcatcttttatattgttacagtgattataattggttgcctggtcccttataatgatcctcgtctgattagcggttcatccagtgaggatattactgcttccccgtttgttattgccttgagcaatactggtgctatgggaacaagagtgtctcattttatgaatgcggtcatcttgatagccgtattttctgtttgcaattcctgcgtttacgcatcctctagattgattcagggtttggcgacagcaggccaacttccaaagatctgcgcttacatggacaggaatggtcggcctttagttggcatggctatatgtggcgcttttggattgttaggctttttggttgtttccaagaaccagggtacagttttcacatggttgtttgcgttgtgttccatttcatttttcacaacttggttctgtatttgcttctgtcaagtcagatttaggatggcaatgaaagctcaaggaaggtcaaaggatgacattatctatagatcgacattagggatatacggaggaattttcggctgtatcttaaatgttctattggtaattggagaaatatatgtatcggctgcacccgtgggtagtcccagttctgctgctaatttctttgaatattgtatgagtattcccataatgattgctgtatatattggccatagaatttaccgcagagactggagacactggtacatcaagcggatggatattgacctcgatagcggacattcgttagaggacttcgaagccaccaagcttgagagggatgaggataagaaatacgtttcctctaagccactttactataggatctatcggtttttctgttaa

SEQ ID NO: 10 - DNA, 1168 bp, Saccharomyces cerevisiae
cattatggtactgaacttgtttggtgtgagaggctttgccgagactgagtttgctctgtcaatcattaaggttattgctatatttattttcatcattattggtatcgtccttattgccggaggggggcctaactctactggttatattggcgccaaatactggcacgacccaggtgccttcgcaaaacctgtcttcaagaatttgtgtaacacattcgtttctgctgctttttcctttggtggtagtgagttagtgctgttaactagtacagaatctaaaaatatttcagctatatcacgtgctgccaaaggtacgttctggagaatcgcgattttttacattactaccgttgtcattattggatgtctcgtaccttataacgaccccagactgctcagtggttcgaacagtgaggatgtatctgcctctccctttgttattgctttgagtaatacaggatcaatgggtgcaaaagtttccaactttatgaatgtcgttatccttgttgcggttgtgtcagtttgcaattcttgcgtttatgcttcttcaagactaattcaagctttaggtgcatctggccaacttccttcggtatgttcctacatggacagaaagggtaggcctttggttggcattgggattagtggtgcatttggtcttttaggttttcttgtggcctcgaaaaaggaggacgaggtcttcacttggcttttcgccctttgttccatttcatcattcttcacctggttctgtatttgtatgtcacaaattagatttaggatggctttgaaagctcaaggaagatccaatgacgaaatagcttacaaatccatactgggtgtttatggtggaattttggggtgtgtgctaaatgcattgctaattgcgggtgaaatatacgtatcggccgccccggtcggtagccctagctccgctgaagccttctttgaatactgtttaagtattccaatcatgattgttgtttattttgcacataggttttatcgaagagattggaaacacttctacatcaagaggagtgagatcgatctggatactgggtgttccgtggagaatctagagcttttcaaagcacaaaaagaagctgaggaacaactcattgcttctaagccattctattacaaaatctacagattttggtgttag

SEQ ID NO: 11 - DNA, 1773 bp, Saccharomyces cerevisiae
atgacaaattcaaaagaagacgccgacatagaggagaagcatatgtacaatgagccggtcacaaccctctttcacgacgttgaagcttcacaaacacaccacagacgtgggtcaataccattgaaagatgagaaaagtaaagaattgtatccattgcgctctttcccgacgagagtaaatggcgaggatacgttctctatggaggatggcataggtgatgaagatgaaggagaagtacagaacgctgaagtgaagagagagcttaagcaaagacatattggtatgattgcccttggtggtactattggtacaggtcttttcattggtttatccacacctctgaccaacgccggcccagtgggcgctcttatatcatatttatttatgggttctttggcatattctgtcacgcagtccttgggtgaaatggctacattcatccctgttacatcctctttcacagtgttctcacaaagattcctttctccagcatttggtgcggccaatggttacatgtattggttttcttgggcaatcacttttgccctggaacttagtgtagttggccaagtcattcaattttggacgtacaaagttccactggcggcatggattagtattttttgggtaattatcacaataatgaacttgttccctgtcaaatattacggtgaattcgagttctgggtcgcttccatcaaagttttagccattatcgggtttctaatatactgtttttgtatggtttgtggtgctggggttaccggcccagttggattccgttattggagaaacccaggtgcctggggtccaggtataatatctaaggataaaaacgaagggaggttcttaggttgggtttcctctttgattaacgctgccttcacatttcaaggtactgaactagttggtatcactgctggtgaagctgcaaaccccagaaaatccgttccaagagccatcaaaaaagttgttttccgtatcttaaccttctacattggctctctattattcattggacttttagttccatacaatgaccctaaactaacacaatctacttcctacgtttctacttctccctttattattgctattgagaactctggtacaaaggttttgccacatatcttcaacgctgttatcttaacaaccattatttctgccgcaaattcaaatatttacgttggttcccgtattttatttggtctatcaaagaacaagttggctcctaaattcctgtcaaggaccaccaaaggtggtgttccatacattgcagttttcgttactgctgcatttggcgctttggcttacatggagacatctactggtggtgacaaagttttcgaatggctattaaatatcactggtgttgcaggcttttttgcatggttatttatctcaatctcgcacatcagatttatgcaagctttgaaataccgtggcatctctcgtgacgagttaccatttaaagctaaattaatgcccggcttggcttattatgcggccacatttatgacgatcattatcattattcaaggtttcacggcttttgcaccaaaattcaatggtgttagctttgctgccgcctatatctctgttttcctgttcttagctgtttggatcttatttcaatgcatattcagatgcagatttatttggaagattggagatgtcgacatcgattccgatagaagagacattgaggcaattgtatgggaagatcatgaaccaaagactttttgggacaaattttggaatgttgtagcatag

SEQ ID NO: 12 - DNA, 1725 bp, Saccharomyces cerevisiae
atggatgaaactgtgaacatacaaatgtccaaggaaggtcagtatgaaatcaattctagctctataataaaagaggaggagtttgtagatgaacaatattctggggagaacgttacgaaggccatcaccacagagagaaaagtcgaggatgatgatgctgctaaggaaacagagagctcaccacaagaaagaagagaggtgaagcggaagttaaagcagcggcatatagggatgattgctctcggcggcaccattggcacgggcctcataattggtattggtccgccattggcacacgccggccctgttggtgccttgatatcgtatttatttatggggacagtgatttactccgttacacaatcgttaggagagatggccacttttatcccagttacatcttcattttctgtcttcgcccaaagatttctgtcgccagcgctgggagcgactaacggatatatgtactggctgtcgtggtgtttcaccttcgcactggaactatccgttttggggaaagttattcagtactggacagaagcagtgcctctagcggcttggatcgtgatcttttggtgcctgttaacttcaatgaacatgtttcccgtaaagtattacggagaatttgagttttgtattgcctccataaaggtcatcgcgttgcttggttttatcattttctcattctgtgttgtgtgtggtgcgggacaatctgatggacccatcggtttcaggtactggagaaatccaggagcctgggggcctggcattatctccagtaataaaaatgagggccgttttctcggatgggtttcctctttgattaatgctgcatttacgtaccaaggtactgaactggttgggataaccgctggtgaagcggctaacccaagaaaagctctcccgagggcaataaagaaagttgtagtgaggattctagtcttttacattctttcactatttttcattggccttttggtcccatataatgacccaaagttggatagtgacggtatatttgtctcttcatcgccctttatgataagcattgagaattcaggcacaaaagttctcccagatatatttaacgcagtcgtgctaatcaccattctttccgcaggtaactctaatgtgtacattggctcaagagtactgtatagtctgtctaaaaatagcttggcgccaaggttcttgtctaacgtgaccagaggtggtgttccatacttttctgttctatctacatccgtgttcggatttttggctttcttagaggtttctgcaggcagcggcaaggcctttaactggttattgaacataactggtgtggccggtttctttgcctggcttttgatttcattctctcatatccgtttcatgcaagccataaggaaacgtggtatatcgagggatgacttaccttataaagctcaaatgatgccttttttggcatattatgcatcttttttcatcgctctaattgttctgatccagggcttcaccgctttcgcacctacttttcagcctatagactttgtcgctgcatatatatcagtattcctatttttggccatatggttatcattccaagtttggtttaagtgccgcttactctggaagctgcaggatatcgatatcgattctgatcaccggcaaatagaggagttggtatggatagagccagaatgtaaaacaaggtggcaacgagtttgggatgtcctttcataa

SEQ ID NO: 13 - DNA, 1836 bp, Saccharomyces cerevisiae
atgggcaggtttagtaacataataacgtccaataaatgggacgagaaacaaaacaacattggcgaacagagcatgcaggaattaccagaagaccagatagaacatgagatggaagcaatagatccaagtaataagacgaccccatactctattgatgagaaacagtacaacacaaaaaagaagcatgggtcattgcaaggtggcgcaatcgctgatgtaaattcgataactaattcgttaacaagattgcaagttgtctctcatgaaccagatattgacgaggatgaagaagaagcccactatgaggataaacacgtgaagagagccttgaagcaaagacacattggtatgattgcactaggtggtacaatcggtactggtcttttcgttggtatctccactcccttgagtaatgctggccctgtggggtccctgattgcttacattttcatgggcaccattgtctacttcgttacccagtcacttggtgagatggctacgtttatccccgtgacatcatctatcactgtcttttcgaagaggttcttatcacctgcattcggtgtttctaacggttacatgtactggttcaattgggctattacttatgctgtggaggtttctgtcattggccaagttattgaatactggacagataaagttccattagcggcctggattgcgatattctgggtaattattactttgatgaattttttccctgtcaaagtttatggtgaatttgagttctgggtggcctctgttaaagttttagccattatgggttacttgatatatgctttgattattgtctgtggtggatcccaccagggccctatcggtttcaggtactggagaaatccaggagcctgggggccaggcatcatctccagtgataaaagtgaaggccgttttctcggatgggtctcctccttgattaatgctgcatttacgtaccaaggtactgaactggttgggatcaccgctggtgaagcggctaacccaagaaagaccgttccaagagctatcaataaagtcgtctttagaatcgtactattctatattatgtctttgttctttattggtctactggttccatacaacgattcccgtttatctgctagttctgctgttattgcatcatcacccttcgttatttccattcaaaacgctggtacttatgctcttccagatattttcaacgccgtggtgttgattactgttgtatctgccgctaattcgaatgtttacgttggttcccgtgttctttactctttagctaggactggtaacgcaccaaagcaatttggatacgtcaccagacagggtgttccatatctcggtgttgtttgcactgctgcattgggtcttttggcattcctggttgtcaataacaatgcaaacactgcatttaactggttgatcaacatttccactttggctgggttatgcgcctggttattcatctctttggcacatattaggttcatgcaagctttaaagcaccgtggtatttctcgtgatgatctgcccttcaaggccaaattgatgccttatggtgcctactacgcagccttttttgtcaccgtcatcatattcatccaagggttccaagcgttctgtccgttcaaagtttctgagtttttcacatcttacatctccttgattcttttagccgttatgttcatcggttgccagatatactacaaatgcagatttatttggaagctagaagatattgacatcgattccgacagaagagaaatcgaagcaattatctgggaagacgacgagcctaagaatttatgggagaaattctgggctgctgttgcataa

SEQ ID NO: 14 - DNA, 1884 bp, Saccharomyces cerevisiae
atggtaaatatactgcccttccacaagaacaatagacacagcgcgggagtcgtcacctgcgcggacgatgttagcggcgacggtagcggcggcgacaccaagaaggaggagaatgttgtccaggtaacggaatcaccatcgtccgggtcgcgcaataatcatcgcagcgacaatgaaaaagatgacgccatccgtatggagaaaatatctaagaaccagtccgcgtcgtccaacggcaccatccgcgaggatttgattatggacgtggacttggagaaatcgccctccgtcgatggcgatagcgagccgcacaaactaaaacaaggtttgcagtcgcgccatgtgcaactgatcgcgctgggcggcgccatcggtaccggtttgctggtggggacttcatccacgcttcatacgtgcggtcccgcggggctgttcatatcgtacattattatttccgcggtgatctacccgatcatgtgcgcgctgggcgaaatggtgtgctttttgcccggtgatggttctgacagtgccgggtcgacggccaatctggtcactaggtacgttgacccttcgttgggcttcgccactgggtggaattacttctactgctacgtcattttagtggccgccgagtgtacggcggcatccggtgtggtcgaatactggaccaccgcggttcccaagggcgtttggatcacgatctttctatgcgtggttgttatactaaacttttccgcggtcaaagtgtacggcgaatccgagttttggttcgcgtctatcaagatattatgcattgtgggactgatcattctgtcctttattttgttttggggtggtggccccaaccatgaccgtcttggcttcagatactggcaacatccgggcgcttttgcgcatcacctcacgggcggatcgctgggtaacttcacagatatctacactgggattatcaagggcgccttcgccttcattcttggtccggaactggtgtgcatgacttccgcggaatgcgcggaccagcgtagaaatatcgctaaggcttcgcgccgctttgtatggagactgatcttcttctacgttctggggacgctggccatctccgttattgttccatataatgacccaacattggtaaatgcgctggcgcagggcaaaccgggagccggctcgtcaccctttgtgatcggaattcaaaacgccgggattaaggttcttccccacattatcaatgggtgtatcttgaccagcgcgtggtctgccgccaatgcgtttatgtttgcgagcacaagatccctgttgaccatggcgcaaacgggacaggcacccaaatgtttgggcagaatcaacaaatggggtgttccatacgtggctgtgggtgtttccttcttgtgttcttgtttggcatatctgaacgtgtcttcatccacggcagacgtgttcaattggttttccaatatcagcaccatttccgggtttctgggctggatgtgcggctgcatcgcgtacctgagattccgcaaggctattttctacaatggcctctacgacagattgcctttcaagacgtggggacagccttacaccgtgtggttctctctcattgttataggcatcatcaccattaccaacgggtatgccattttcatccctaagtactggagagtagcagatttcatagctgcctacatcaccctacccatcttcctggttttgtggttcggccataagctgtatactcggacgtggagacaatggtggctccctgtgtccgagatcgatgttactacagggctagtcgagatcgaagagaaatcaagagaaattgaggagatgagattaccccccaccggtttcaaagacaagttcttggacgccttgttgtaa

SEQ ID NO: 15 - DNA, 1827 bp, Saccharomyces cerevisiae
atgaagatgcctctaaagaagatgtttaccagcacgtctcctcgtaactcttcttctcttgacagtgatcatgacgcttactattcgaaacaaaatcctgacaatttccctgtaaaggagcaagaaatctataacattgacctggaagaaaacaatgtgtcctctcgttcatccacctctacatcaccttcagcaagggacgactctttcgcagttccagatggtaaagacgaaaacacgcggttgaggaaagatttaaaggcaagacatatttctatgatcgccattggtggttcattaggtacaggtctgcttataggtacaggtaccgccttattgacgggtggtccggttgcgatgttaattgcatatgcctttgtcggccttttagtcttttacaccatggcctgtcttggtgaaatggcttcttacattccattggatggttttacaagttatgcctcacgttacgtggatcctgcattaggttttgctattggttatacttaccttttcaaatatttcatcttacctcccaaccaacttactgctgctgctttggtcattcaatattggatcagcagagaccgtgttaaccctggtgtgtggattactatattcttggttgttattgtcgctatcaatgtcgtcggtgtaaaattctttggtgaatttgaattttggttgtccagtttcaaagtcatggtaatgttgggtctaatcctgttactatttattattatgcttggtggaggtcctaaccatgaccgcctagggtttagatactggcgtgatcctggtgcgttcaaagaatattcgacggctatcactggtggtaaaggtaaatttgtttcgttcgttgctgttttcgtttacagtcttttcagttacacgggtattgaattgacaggtatcgtttgttctgaagctgagaatccaagaaaaagtgttccaaaggcaattaaattgacagtttaccgtatcattgttttttacctatgcaccgttttccttttgggtatgtgcgttgcatacaatgaccctcgtttactttccacaaaaggtaagagtatgtctgctgcggcatctccattcgtggttgccattcaaaactcaggtattgaagtcttacctcatatcttcaatgcttgtgtcttggttttcgttttcagtgcttgtaactcagatttgtacgtttcttccagaaatttatatgcgttggcaattgatggtaaagcgccaaagatcttcgctaagacaagtagatggggtgttccttacaatgctttaatactctccgtgctgttttgtggcttggcgtacatgaatgtgtcttcaggatcagcaaagattttcaactactttgttaacgttgtttctatgttcggaatcttgagttggatcaccattttaattgtttacatctacttcgataaagcctgccgtgctcaagggattgacaaatcaaaatttgcttatgtcgctcctggccaacgttatggtgcttattttgctttattcttctgcattttgattgctttaatcaaaaacttcactgttttcctaggtcataaatttgattataaaacattcatcaccgggtatattggcctgcctgtctatatcatttcttgggctggttacaaattgatatacaaaaccaaagtgataaagtctaccgacgtggatttgtacacatttaaggaaatatacgatagagaagaagaagagggaagaatgaaggaccaagaaaaggaagagcgtttaaaaagtaacggtaaaaatatggagtggttctatgaaaaatttttgggtaatatcttctag

SEQ ID NO: 16 - DNA, 2559 bp, Saccharomyces cerevisiae
atgagttctgtcaaccaaatatatgacctatttcccaataagcataatatccaatttacagattctcattcacaggagcatgatacttcgtccagccttgctaagaatgatacagacggaactataagtataccaggtagtatagacactggcattttaaagagcattattgaggagcaaggttggaatgacgctgagttatatagaagttcaatacaaaatcaaagattttttttaacggataaatacactaaaaagaagcatttgactatggaggacatgcttagcccagaagaagaacaaatatatcaggaacctattcaagatttccaaacatataacaaacgtgttcaaagggaatatgagctcagggaaaggatggaagaattcttccgtcaaaacaccaaaaatgatttacatattttaaacgaggattcattaaatcagcaatattccccgttaggacctgcagattatgttctgcccctcgatagatactccagaatgaaacacattgcctcaaactttttcagaaaaaaacttggtattcctagaaaactgaaaagaagaagccattataatcccaacgcagagggccacaccaaagggaattcttctatattgagttccactactgatgtaattgataacgccagctacaggaatattgcaatagatgaaaatgttgacataacacataaagaacacgccattgacgaaataaacgagcagggtgcatcaggtagtgaatctgttgtggaaggtggatcgttattgcatgacattgaaaaggttttcaataggtccagggcaactaggaaataccatatccaacggaaattaaaagtgcgccatattcaaatgctttctatcggggcttgctttagtgtcggattatttttaacctcagggaaagccttttctattgccgggccatttggtacactacttgggtttggactcacaggtagcatcattttagccacaatgctgtcatttacagagttatccacccttattcctgtgtcttctgggttctcaggactggcttctagatttgtagaggatgctttcggatttgcattgggctggacgtattggatttcctgtatgcttgctcttcctgcccaagtttcctcaagtacattctatctcagctattataataatgtcaatatatcaaagggagtaacagcagggtttatcacgctgttttctgcatttagcattgtagtaaatttactggatgtcagcataatgggtgaaattgtatatgttgctggaataagcaaagtgataattgcaattttgatggttttcacgatgatcatcctaaatgccggacatggaaatgacattcacgaaggagtcggttttagatattgggatagctctaaatctgtccgaaatttgacctacgggctatatcgtccaacatttgacctggctgatgctggcgaaggaagcaaaaaaggaatttcaggcccaaaaggccgatttttagctacggcatcagtaatgctaatttcaacatttgcgtttagcggtgttgagatgacttttttagctagtggggaagctataaatccaaggaaaacaattccttctgctacaaaaaggacattttccattgtactgatatcttacgtttttttgattttttcggtaggcatcaacatatacagtggcgatccaagactactatcatattttcctggtatttccgaaaagaggtatgaagccattataaaaggcacaggaatggactggagacttaggactaattgtcgcggcggtattgattataggcagatttcagtaggaacaggttattctagtccttgggttgttgcattgcagaactttgggctatgtactttcgcatctgcttttaacgcaatactgatatttttcactgctacagcagggatatcctcgttatttagttgttcaagaacactatacgccatgtctgtacaacggaaggcaccgccagttttcgaaatttgcagcaagagaggtgttccttatgtttcagtgatattctcctctttattttcagtcattgcttatattgcagttgaccaaaccgcgattgaaaacttcgacgtcttggccaatgtttctagtgctagtacgtctattatatggatgggattgaatctttcctttttgcgattctattacgccctaaaacaaaggaaggatattatatcaagaaatgattcatcatacccatataaatcgccattccaaccatatctagcgatttatggtctagttggatgttcattatttgttatatttatgggatatcctaactttatacatcatttctggagtactaaagcttttttttcagcatatggtggcctgatgtttttctttatcagttacacagcttataaggttctcggaacgtcaaagattcaaagactagatcagttagatatggacagtgggaggagggaaatggacagaactgactggaccgaacatagccaatatttgggaacatatagggaaagagcgaagaagttggttacctggctgatttag

SEQ ID NO: 17 - DNA, 1791 bp, Saccharomyces cerevisiae
atgacaaaggaacgtatgaccatcgactacgaaaatgacggtgattttgagtacgataagaataaatacaagacaataaccactcgaataaagagtatcgaacctagtgagggatggttggaaccttctgggtcagtgggtcacataaacacgatacccgaagcgggcgatgttcacgtggatgaacatgaggatagagggtcttctattgatgatgactcaaggacttacctgctatatttcacagaaactcgacgtaaactagaaaacaggcacgtccagttgattgctatttccggtgtcattggtacggcgctattcgtggcgatcggaaaagctttataccgtggagggcccgcctctttattattggcatttgctctttggtgtgttccaatactttgcattactgtgtctacagcggaaatggtctgctttttccctgtaagttccccctttttgagattagcaacgaagtgcgttgacgattcattggctgtcatggctagctggaatttctggtttcttgaatgcgtacagatccctttcgagattgtttctgttaatacaattatacattattggagagatgattattcagctggtattccgctcgccgttcaagtagttttgtatctgcttatttccatttgtgcagtcaaatattacggtgaaatggaattttggttggcttctttcaaaattatccttgcactcggcctatttacattcacgttcattaccatgttgggtggaaatcctgaacatgatcgttacgggtttcgtaattatggtgaaagtccattcaagaaatactttcccgatggcaatgatgtggggaagtcttcgggctacttccaggggtttctcgcttgcttgattcaggcatcgtttaccatagctggtggcgagtatatttctatgttagcgggagaggtcaaacgaccaagaaaagtattacccaaggcgtttaagcaggtgtttgtgagattaacatttttgtttttagggagttgtctgtgtgttgggattgtttgttcgccaaatgatcctgacttgacagcagcaattaatgaagcaaggcctggcgccgggtcttcaccttatgtcattgcaatgaataatctgaaaattagaatattacctgacattgttaatatagctttgattacagccgccttttctgctggtaacgcttacacttattgctcatccagaacattttatggtatggcattagatggctacgcgccaaaaatcttcactagatgcaataggcatggtgtgcccatttactctgtggccatatctttggtatgggctttagtgagccttttgcaactgaattctaatagtgcggtcgtattgaattggttaattaacttgattactgcctctcaattgattaattttgtcgtcctttgtatcgtctatttatttttcagaagggcttaccacgtccaacaagattcgttacccaagttgccattccgttcgtggggtcaaccatacactgctattatcggccttgtttcatgttccgcaatgattttaatacagggctacaccgttttctttcccaaattatggaacacacaagattttttgttttcgtatttaatggtgtttatcaacatcggtatatatgtgggctacaaatttatttggaaacgtggtaaagatcacttcaaaaacccacatgaaattgacttttctaaagagctaacagaaattgaaaaccatgagattgaaagctccttcgaaaaatttcaatattatagcaaagcataa

SEQ ID NO: 18 - DNA, 1677 bp, Saccharomyces cerevisiae
atggcagtccttaacttgaaacgtgaaactgtcgacattgaagagacagcgaagaaagatatcaaaccttattttgcttcgaatgttgaagcggttgatattgatgaagatcccgatgtttcaagatacgatccccagacaggagtgaaaagggcgctcaaaaataggcatatctcattgctagctttgggtggtgttattggcccaggttgtcttgttggtgcaggaaacgcactcaacaaaggtgggccacttgctttacttttaggctttagtattattgggatcattgctttctcagtgatggaatctataggtgaaatgatcactttatatccctcgggcggtggatttaccactttggctcgaagatttcatagcgatgcactgcctgcagtttgcggttatgcttacgttgttgtgttcttcgcagttttggcaaatgagtacaacactctctcctccatactacagttttggggcccacaagtccctctatatggttacatcttgatattctggtttgcatttgaaatttttcaactagttggcgttggtctttttggtgaaacggagtactggcttgcttggttgaaaatagtaggattagtagcctattatattttctcgattgtttacatatctggggatattaggaatagaccagctttcggctttcattattggaatagtccaggtgcattatcacatgggtttaagggaattgcgatagtgtttgtgttttgttcgaccttctattctggaacggaatcagttgccttggctgcaacggaatcaaaaaaccctgggaaggctgtgccacttgctgttcgacaaactctgtggagaattttagttgtttatattggaattgctgttttctatggagcaactgttccgtttgacgacccaaacctctctgcttctaccaaagtcctaaaatctcccattgctatcgccatatctcgtgctggttgggccggcggagctcatctggttaatgccttcattttgataacttgcatctccgccattaatgggtcactttatatagggagcagaaccttgacgcatttagcacatgaaggcctagctccaaaaattctggcttggaccgatcgaagaggcgttcccatccccgccatcactgttttcaacgccttgggcctaatatcattgatgaatgtgagcgttggagctgcaaatgcgtactcttatatcgttaatctttctggtgttggcgtctttattgtctggggtgtaataagttatacgcacctgagaataaggaaggcgtgggttgctcaaggaagatccatagaagagctaccttatgaagcgctattttatccgtggacgccagtacttagtctggccgctaacatttttctagcactcatccaaggatggagctatttcgtaccttttgatgcgggcaattttgttgatgcttatatccttctgcctgttggaattttattgtatattggcatatgtgtttttaagagcaatcattttagaactgttgatttgcggtcaatcaacctagacgaaggacgaagaaaagacatggaggctgatctttctgatcaagagagtagcttagcatcttcggaaacgatgaaggattataaaagtgcaacttttttcagatacctcagcaacattttcacctga

SEQ ID NO: 19 - DNA, 1725 bp, Saccharomyces cerevisiae
atgtcggaaggaagaacgtttctgtcacagttgaatgtcttcaacaaggagaactatcaattttcttcttctactacaaaaaaggaagtaagtaactcgacagtggatgctgacaacggtgcctccgattttgaggcaggccagcaatttgctacagaattggaccaaggtgaaaagcagttaggtattttgtcgtgtattgggcttatctgtaatagaatgcttggtaccggtgttttcgccgtttcctcgaccatttacacactatgtgggtctgtggggcttgcattaattatgtgggcagttggcgccattattgccatttctgggttatatgtatacatggaattcggtacggctataccgaaaaatggtggtgaaaaaaactacctggaggctattttcaggaaaccaaaattcttcattacctgtatgtatgctgcgtatattttcttcctaggttgggctgctggtaattccatcaatacagctattatgtttttaactgctgctgatactgaagtgaccaaatggaatcaaagaggtattggtgtggccgtcgttttttttgcattcctaattaattctctgaatgtcaagattggtctatatttgcaaaacattttaggtattttcaagattggtattgtcctcttcatttctattaccggttgggttgcccttggcggtggtctcaaagatggttatcaatctcacaactttcgtaatgcttttgaaggtactgaaaccgccactgcttatggtattgttaacgccttatatagtgttatttggtcgtttgtcggttactccaatgttaactatgcacttggtgaagttaagaaccctgtgagaactttgaagattgctggtcctacatcgatggtcttcttggctataatctacatttttgtgaacattgcttacttcgctgtggttccaaaagataagttaatttcttcaaaattgattttagctgctgacttcttcgatattgtgtttggcggccaagccaagagagcagcagccgcactggtcgggttgagtgccttaggaaatgttctttctgtcattttttctcagggtagaattattcaacaactaggacgtgaaggtgtgttgcccttttctaatttctttgcctcttctaagccattcaactccccaatggttggtttgtttcaacattttattgtttgtacagtaaccattttagccccacctccaggtgatgcatatttgctagtccaaaatttaatttcctacccaatgaatattattaattttgccattagcgcgggtttgctttggatatactggcaacgtagacaaggtaaaattgaatggaacccaccaattaaggccggtgtttttgttacgggatttttcacattatccaatttatacctgattattgctccttacgttccaccttcaaatggcgagtcggtgtattcaagcatgccatactggatccactgtgtaattgcttggggtattttcttctttggtggtgtttactacgttgtttgggcccaattattgccaagatggggccactacaaattggtttccaaggatgtgcttggtgaagatgggttctggagagtcaaaattgccaaagtttatgatgacactattggcgatgtcgatacacaagaagacggcgttattgaaacgaatataatcgaacattacaaaagtgaacaagaaaaatcgctgtaa

SEQ ID NO: 20 - DNA, 1641 bp, Saccharomyces cerevisiae
atggaaccgctgctttttaatagtgggaaagcaaatccctctcaagatgttttcatagatgtggaagttggtgatattaccacaaaatatggttccacaaatactggatcattcagttcgatggatactgtggaagcgcaggcgataaaggcagagacggcaagattcatggaagttccacagggaagacatttaggtgtgttctccacggttgtgttatttgtttcgaggataatggggtcaggtatatttgcagtacccagtgtgattttactgaatacaggtggtaataagctgatatattttgcgatctgggtttttagcgctgcgatcgcttttgcaggattgtatctttttctagaatttggttcctggataccgaaatcaggtggacgtaaaaacttcctcgaacggagttttgaaagacccagactattaattagtgtggtgttttcgtgttacagtgttttaactggctatgcattgacgggatctatcgtcttcggtaaatacgtgttgagcgcatttggagtcacggatgattcgtggtccaagtacgtcagcatatcatttataatatttgccgttctcattcacggtgtctctgtaaggcacggagtgtttatacagaacgcacttggtggtttgaagttgatcatgattgtcttgatgtgctttgccgggctatacacgcttttcttttataaaagcaccggtcaagttgcctgggacctcccagtaacccaagttgagaaagattctctcctgtcggtgtcctctattgctactgcctttatcagctcattcttttgtttttctggatgggatacagttcacacagttacatcagaaattaagaatcccgttaagacgttgaaggtgtcaggtcccttatcgttgataatttgttttgtctgctacacaatgatgaatgtggcatacttgaaagttttgacatatgaggaaattgttagtgcaggccccctggttggttccgtgttgtttaccaaacttttcggacccagagttggtggcaaattcattgctttttctatcgccatttctgcagcatctaatattctggttgtcatttacagtatatcaagagttaaccaggaaatattcaaagaaggttatttaccattcagtattcatatgtccaaaaattggccatttgatgcacctctaccatctatttctttatgtggctttataaccattgcttggatattgattttacccaaagagggcgaatccttcaattatctggtatcgatggatggttatggtaatcagtttttcttattattggtcgctattgggctctttatttggaggttcaaacacaagaacgaagtcccagagattcgtgcatctacttttggagtattagccattattacattatcattatacatgttgatggcaccattctttgccgaccctagcctaaacagagttgggttcctgccgccctaccaaatcatgtcattactggtaatagttgcatgcttctttttctggttagttaaattcgttttactacctaaattcttccattataaacttttacccaaaatcacttatttgcatgatgggctcattgtcacagaatgggtgaaaaagccatgtctgtgttag

SEQ ID NO: 21 - DNA, 1716 bp, Saccharomyces cerevisiae
atgagtatgtcaagcaaaaacgagaataagatatcagtagaacaaagaatatccactgatatcggtcaggcttaccagttacaaggccttgggtctaacctaaggtcgattcgctccaagactggtgccggtgaagtgaactatatcgatgctgctaaatctgtaaatgataaccaactgcttgcagagatcggttataaacaagaattaaaaagacaattttcaacattacaagttttcggtattgcgttctccattatgggtctattgccctccattgcatctgtgatgggtggtgggctcggtggtggtccagcaacattagtgtggggttggttcgttgctgcgtttttcattttactggtgggtattaccatggctgaacatgcaagttccattcctaccgctggtggtttgtactactggacgtattactatgctccagaaggttataaagagattatttcttttattattggttgctcaaactccctagcgttggcagccggtgtgtgttccattgattacggtttggctgaggaaattgctgctgctgtcacattaaccaaagatggaaattttgaagtaacgagtgggaaactttacggtatatttgctggagcagtggtggttatgtgtatttgtacatgtgttgcttctggggccattgctcgtctgcagacgctaagtatatttgccaatcttttcattattgttttattgttcattgcgctaccgattggtaccaagcatagaatgggaggtttcaatgatggtgactttatatttgggaaatatgaaaacttaagtgactggaataatggttggcaattttgtcttgctggtttcatgcctgctgtctggactattggttcctttgattcatgtgtccatcaatctgaagaagccaaagatgccaagaaatcagtccccattggtataatctcatctattgctgtttgttggattttaggttggttgattattatttgtttaatggcctgtatcaaccctgatattgacagcgttttggactccaagtacggctttgctttggctcaaataatttatgattcgttaggaaaaaaatgggccattgcatttatgtcattgatcgcattctgtcaatttctaatgggtgcttccattaccacagctgtttctagacaagtttgggcattttcccgtgataacggtttgcccctatcaaagtatattaaaagagtggattctaaatactcggtcccttttttcgctattttggctgcctgtgtaggttccttgattttaggattgttatgtttgattgatgatgccgccactgatgcattatttagtctggctgttgcaggaaacaatttggcatggagtacccctacagttttccgtttaacatcaggtagagatttatttagacctggtccattttatttgggtaaaatctggtctccaattgttgcttggacaggtgttgctttccaattgttcattattattttggttatgttcccctctcaacaacatggtattactaaatccacaatgaattatgcatgcgttattggtcccggtatctggatccttgcaggtatctactacaaagtttacaagaagaaatactaccacggtccagcaaccaatttgtcggatgatgattatactgaagccgttggtgctgatgttatcgacacaattatgtccaaacaggaaccataa

SEQ ID NO: 22 - DNA, 1857 bp, Saccharomyces cerevisiae
atgccagagtatacgctactggctgataatataagggagaatatcgttcatttcgatccgaatggtttgtttgataacttgcacaccattgttcatgaagatgacagtcaagagaacgaggaggccgagcatttcaattatgatcaggtgttggataaatcgttattgtcaagaggttctattgtcggtctcggtttaggactaatgagtcccgttttaggaatgtgcactagtatggccattgggctaattaatggtggtccgttaactataatgctaggttttttaatcagtggagtgtgtatatggttttcgtcgctttctcttggtgagattgtttcaaaatttccgatggaactgcatgttgggagtgccatgttggccccggagaaattgaaattagtatgttcgtggtacactggctggttaatgctcatagggaattggactatgagtaccagtattacttttgcaggcgctcaacttaccatttctttgattctgatgacgaactccaacctaatatccgaggcacacttgattttttacacagtcattgtattttacttagttgtgactgttgtaggcctcgtgaatttgaaatttgcaagatttattgaaacaataaacaaagtctgtgtttattggatcatatatgccattatatttattgatattcttctactagtattccacaaaggtaaatttcgatctttgaagtacgcgctatttcactttgataataatctatcagggtataaaagcgcatttctttccttcatcattggattccaacagtctaatttcacgttacaaggtttcagtatgttacctgctttagctgacgaagtcaaagttcctgagaaggatattccacgtggtatgtcgaatgcggtattgttatccgcgttctctggagtcatttttcttataccaataatgttaatcctgccagataatgatttgctttttaccaatcataaggttctaccaatagtgaacatttttacaaaatcgactgattcggtggtcttgtctttttttttagtgctcctaattttaggaaacttactgttttccggaattggctcgattactacatcttctcgtgcggtatatagttttagtcgtgaccaggctataccatactacgataaatggacctacgtcgaaccggattctcagtcaaaagtccccaagaattctgttgtattgagtatgataatatcatactttttaggtctgctagctttgatttcaacggccgcatttaatgcttttataggcgctgcagtgctctgtctttgttctgcgactttcattccgttagtcttggtgctgtttacgagaagaagagctatccgaagcgcgccagtaaaaatcaggtataagtttggttggttcatcaacattgtttctattgtgtggctcttgttatctatggtttctgtttgcctaccaacgcaagtgcctgtaactttcaaaacaatgaattatgctttaatggtgtacgtattctgcattttagttatcactggtctttatttcaaatgggggaagtataattttagattacccttggcagatgacatcaaggctccaattcccagtgatgcggaagaaactgtttttgaactagaggatagcaatgttgaacatactctaaactcgggaaccacagtgaaagagtctgtagaaaataattctgaagaaggtttcatcaaggtgcatcctaaaagtagtacagaaaatccctttgaggaaaatgaggaaaacgtgataaccgattatggtgatgagcaccatacagcagaacaagaatttgatcttgccgatgatcgtagatatgatatatga

SEQ ID NO: 23 - DNA, 1692 bp, Saccharomyces cerevisiae
atgagtattcggaatgataatgcttccggtggctatatgcagccggatcaatcttcgaacgcttctatgcacaaaagagacttaagagttgaggaggaaataaagccattggatgatatggatagcaagggtgctgtagcagcagatggtgaagttcatctaagaaagtcattttcgttgtggtcaattcttggtgttggattcggtttgactaattcctggttcggtatttctacatcgatggttgcaggtatatcttctggtggacccatgatgattgtttacggtataattattgttgccctgatttctatttgcattggtacctcgttgggtgaattatcttccgcatatccgcacgccggtggtcagttttggtggtctttgaagcttgcccctcctaagtacaaaagatttgcggcctacatgtgcggttcatttgcttacgcaggatccgtgttcacaagtgcttcaactacgttatccgttgctaccgaagtggttggtatgtacgctctgacgcaccctgaattcatcccaaagagatggcatatattcgtttgctttgaattgttgcatttgttcttgatgtttttcaactgttacggtaaatccttacctatcatttcatcttcctctctatacatttccctactatcctttttcacaattacaattactgtattggcatgttctcatggaaagttcaacgatgcaaagtttgtttttgccacatttaataatgaaacaggttggaagaacggcggtatcgcctttattgtcggtttgattaacccagcttggtcattttcgtgccttgactgtgcaacccatatggcgtttgaagttgaaaaaccagaaagagttattcccattgctatcatgggaacagtcgccattgggtttgtcacttccttttgttatgttatcgctatgttcttctctatacaagatctggacgctgtcttgtcttctacaacaggcgccccaatcttggacatttataatcaggcattgggtaataaatcaggtgcgattttcctgggttgcttgattctatttacctcttttggttgcgtcattgcttgtcacacttggcaggcaaggttatgttggtcatttgccagggacaatggtcttccattatcccgtttatggtcgcaagttaacccacacactggtgtacctttgaacgctcatttaatgtcatgcgcttggataaccctcattggcctactttatttggcttccagtacggcttttcagtccttaattacaggttgtattgcatttttattgttatcctacatcattccggttatatgtttacttgctaaaaagcgtaacatagctcatggtccattctggcttggaaaatttggatttttttcaaacattgttcttttgggttggactgtcttttctgtggtctttttttcctttccaccagttttacctgtgacaaaggataacatgaactatgtttgtgtagttattgttggttatactgcgtattcgattctttactggaaatacaagggtaagaaggaattccacgctttagaagaatctgagaacgaacaggctgaatatagtaataacttcgataccattgaagatagtcgagaattttccgttgcggcctctgacgttgaactcgaaaatgaacacgtaccgtggggaaagaagtga

SEQ ID NO: 24 - DNA, 1686 bp, Saccharomyces cerevisiae
atgaacagagtaggggcagtgttcctatttgtatatgaaagaaatttttttttgtctattgttccagatcgtcacaggacggaaataagaatgtctagttcagaaaggtcagaagtcaagtttgacaagcactttaattggtggtccctattaggtatcgcgttctcattaagttgctcatgggtcggtatctcagcgtcgatggccgttggtattgccagtggagggccactgcttatcatctatgggttgataattgctgcttttttcagtctcatgtgtggtatatctctgggagattttgctgctatcctgccaaacagcagcggtggttcattttgggttcttaaaatgttggaacaagaatcagtcactttgaaaacccctgagtacgaggacccttctgacgatgatgaagaagtgttcctcgagaattattgtcaaactttcaacgtggaagtttcttctaaatttcaaaaggtttcttccatggttgtagggttgctgaactatttcggtgccatttttactaccgcaagtatctgctcatctttgtcaatgagctgtatcggtattcataagttgttgcatccggactacgagttaaagcactggcatgtttttgtgggttacgagtgtatcaatgccgttttgacacttttcaacatttattcaactccgttgccctatatctctcagtttgggctctatacgtctctattgtctttcgccatgactttcattatttgtattgtttcaagatctgacaacaccgtagacccatggcccaaagcttctaatatatttgggagctttgataatcaaacaggctggaattcgtctggaatggcgtttgttgtcggtttggtcaatccgatctgggcatttgttggcattgactctgctacgcacatgattgatgaagtgggttatagtaagtcacgtttcttagttcccaaagttattatcactaccatcattgtgggctttgtaactagttttatttattgcgttggtttgtttttctgcatcactgaccaaacggcagtcgttgagtctattttacctatcgtagaaatattttaccaggccactggtaataggaatctcagtgtcttcctgcaatgtatgtgtatcacaacaggttttgtttcaggcattgcaagtggaacctggcaaagtcgaatcctccaatcattcgggaaaagttacgcaccattttataaagagggttccttgggaaacaaatccttgaagaagctagcagtgttgacacctgggtttaagtctccattatatgcccattttttgtcacaaatatgtgtaacgataattggctgtatatttatgggatctagtaccgctttcaacgcaattatcactgcatgcatcaccctgttactaatgtcgtacgcagttccttcttttatattcctgttcgttattaaaaaggaaaaattcattcatagaatcgagagtgacgtaaattgtgtcagcaggcctaaccgtcgtcgtatgtctatgattcctcatattatatgtattctatggaccttgttctgcctggtatttttatctttcccatatacactaccggttactgcaggaaacatgaattacacctcagtagtgtatgcagtagttttctgcattatcagcatcgttgttttccctacatgcatctaa

SEQ ID NO: 25 - DNA, 1479 bp, Saccharomyces cerevisiae
atggagagtcgaactacagggcctttaacgactgaaacctacgatggccccactgtggccttcatgatattaggtgccgccctagtattttttatggtgcccggattgggattcttgtactccggattggcaagaaggaagtctgcactagcactaatctgggttgtattaatggcgactttggtcggtatactgcaatggtatttctggggttactctctagctttttcaaagtccgctccgaataataaattcattgggaatctagattcgtttggctttagaaacgtgtacggaaaaaaattcgatgaagatgcctaccctgagctcgcgtatgcaaccttccaaatgatgttttcgtgcgtcaacttaagtattatcgctggcgccactgccgaaagaggcaggctgctaccgcacatggtttttctctttattctagctaccattggatattgtccagtgacgtattggatttggtcaccaggtggttgggcataccaatggggagtcctcgattgggcaggcggcggcaacattgaaatattaagcgctgtttccgggtttgtttactcttggtttttgggcaaaagaaatgaaaagttactgataaatttcaggcctcataatgtttcattggtcactctaggcacatccatactgtggtttggctggctgctatttaattctgcatcctcattatccccaaatttgaggtcagtttatgcattcatgaatacatgtctcagtgccattactggtgggatgacgtggtgtcttctggattacagatcggagaagaaatggtcgacagttggtctgtgctccggtatcatttctgggctggtggctgcaacgccaagctcaggctgtataaccctttacggttcacttattcaaggcattgtggcgggggtagtgtgtaactttgcgacgaagttgaaatactacgctaaagtagatgatgccatggacattctagctgagcacggggttgcaggcgtaataggactaattttcaatgccctttttggagcagactgggtcattggtatggatggcactacagagcacgagggcggctgggtaactcacaattacaagcaaatgtataagcagatcgcttacattgccgcatccattgggtacactgctgctgtaactgcaataatctgctttgtgctcggctacatacccggtatgaggctaagaatatcagaagaggcagaggaggcgggtatggacgaagatcaaattggcgaatttgcgtacgattatgtggaagtgagaagagattactatctatggggtgtagacgaagattcacaacgctctgatgtaaatcaccgggtgaacaacgctcatttggccgctgaacgtagcagtagcggtactaatagttcctcggatgggaatggagaaatgattcaatccgaaaagatcctaccaattcatcaagaagatcctgccaataggtaa

SEQ ID NO: 26 - DNA, 1500 bp, Saccharomyces cerevisiae
atgtcttacaattttacaggtacgcctacaggcgaaggaacgggtggtaactcgttgacaacagatttgaatacacaatttgacttggccaacatgggatggatcggtgtggcttcagcaggtgtgtggattatggtcccaggtatcggtttattatattctggtttatccaggaaaaagcatgctttatccttgctttgggcctcgatgatggcttccgccgtgtgtattttccaatggtttttctggggatactcattagctttctcacacaacactagaggtaacggttttattggtaccttggaattctttgggtttcgtaacgttttaggagccccatctagtgtcagttctcttcccgatatactgtttgccgtttaccaaggtatgtttgccgcagtcaccggtgccctaatgctaggtggtgcctgcgagagggcaaggttgtttcctatgatggtgttcttgtttttatggatgactattgtttattgtcctattgcatgctgggtctggaatgccgagggttggttggtcaaattgggtagcttggactatgcaggtggtttatgtgtccatttaacatctggacatggtggtctagtttacgctttgatactgggtaagcgtaatgaccctgttacacgtaaagggatgcccaagtacaaaccacattccgtcacctcggtggttttaggcacagtgttcttatggtttggttggatgttctttaacggaggctctgcaggtaatgcaactatacgagcatggtactctattatgtccacaaacttagctgctgcttgcggtggcttgacatggatggttatcgattatttcagatgcggaagaaagtggactacagttggtttgtgttcaggtatcatcgctggcctagtgggtatcaccccagccgccgggttcgtgccaatctggtcagccgttgtcattggtgtggttactggtgcaggatgtaaccttgctgttgacttaaagagtctattgcgcatcgatgatggtctagattgttactctatccatggtgtgggtggttgtattggttctgtattaactggtatctttgctgcagactatgtaaatgccactgcaggctcttacattagtccaattgatggtggctggatcaatcatcactataaacaagttggttatcaattagcaggtatatgcgctgcactagcctggactgttactgtcacatctatcttgcttctaactatgaatgccattccatttttaaaactaagattaagtgctgatgaggaagaattaggtaccgacgctgctcaaattggtgaatttacatacgaggaatccactgcttacatcccagaaccaatcagatctaaaacatcggcacaaatgccacctcctcatgaaaacattgatgataagattgtgggtaacacagacgcagaaaagaattctacgccttccgacgcttcttctactaagaacactgaccatatagtataa

SEQ ID NO: 27 - DNA, 1470 bp, Saccharomyces cerevisiae
atggctcggggtgacggacatctatggacagagacatatgatagttccacagtcgcttttatgattttaggtgccgccctggttttcttcatggtaccggggctgggctttctttattccggtttagcaagaagaaaatctgctctggctttgatttgggtagtgataatggctaccttagtaggtatactgcaatggtatttttggggctattctttagcattctctaagactgcgacgaacaacaaatttatcggcaacttggattcatttgggtttagaaacgtctatggcaaaatttcggatgattccacgtatcctgaactgatttatgccattttccaaatgatgttcatgtgtgtcgcattgagtattatagctggtgccactgcggaaagaggtaagctttttccacatatggtttttctttttgtttttgcgactttggtttactgtcccatcacttattggatttgggccccaggtggttgggcctaccaatggggggtattagactgggctggcggtgggaatattgaaatcctaagtgctgtggctggtttcgtttattcttattttctaggaagaagaaaagaaaacctcctgatcaactttagaccacataatgtttccatggtgactttgggtacttctatactttggtttggttggttgcttttcaatgctgcaagctcactgtcaccaaatatgaggtccgtatatgcgttcatgaacacttgtctcagcgccaccacgggtggaatgacgtggtgtttattagattatcgatctgaaaaaaaatggtccactgttgggttatgctccggcattatctgtggtttagttgctgccacgcctagctcgggttgtattactctatatggctctttgatccaaggtataatagcgggtgttgtttgtaattttgcaacaaaaataaagtattatttaaaagtggatgattccttagatctattagctgaacacggtatcgccggtgtggtgggattgatttttaacgctctatttgcagctgattgggttattggaatggacggcacaacaaagcataagggtggttggttgacgcataactggaaacaaatgtatattcaaattgcctatatcggtgcctctgccggctattgtgctgtggtcacggccatcatttgcttcgtattaggtaaaattccgggtgtccatctaagagtcactgaggaagccgaagcattggggttggatgaagatcaaataggcgaattcgcttacgattacgtggaggttaggagagattattaccagtggggtgtagatacagatgcacttcatactacatgcaatggcgctaattctgcgtctgagacaaatcctactgaggacagccaaaactcctcattgtcatcagctacagtaagcggccaaaacgaaaaaagtaataatcctaaattgcatcacgcaaaagaagcatga

SEQ ID NO: 28 - DNA, 1632 bp, Saccharomyces cerevisiae
atgtcagcggatgctagtacaaattcgaatgcttccctagacgaaaaaaatttaaacatcacttcagaagctgaaatcaagaatgaagacgtaaccgcggagccagttctaagcacggtactatcacccaacggtaaaattgtctacatcagtgacaaggttgatgaggccatgaagttggctgaagaagccaaagaaatcgaagtgacaccagaagaagatagaaaacttcgttggaagatcgactattgtatgtttcctttgatgtgtatattgtatgctgttcaatttatggacaagatttccactagttcagcggcggtcatgggattaagaactgacttgaaaatgcatggtgaccagtattcatgggttacttccgccttttatttcggctatctatttatgaacctaggcccggtacagttcattttccaaaggaccagtcacatgtcaaaaatgcttgcggtttttattgtcatatggggaatgttattagctttacatgcagctccaacagttaagtatccttctttcattgttttgagagtacttttaggttgcgcagaaagtgttgtcacaccttgctttaccattatcactgctcaatactggaagacagaggaacaattcacaagagtatcaatttggtttggtatgaacggtcttggctccatcctgatcaacgcaattgcgtacggtgtttacattcaccaggattcttatgctattaaaggctggagaaccttatttgtcattactggtgtgataacaatcttcattggtatcttgatattcctgtggatccctgacgatccatcaaaagcaaggtttttatctaaaagagagaaattaatggttgtccaaagaattaggtctaaccaacaagggttcggtaatcacgagatcaaaaaataccaaattatagaggcgttgaaggatgttaggacgtggttatatttcctctttactgtgagctctaatattcctaatggtggtatttcaagttttatgagtattctattgaatagtgattttggatattcatcaaaggaaaccctattaatgggtttacctacaggtgctgttgaattggtaggttgtccactttttggtattctagcagtttatgcagccaataagaagataccattttggaaatataagttgagttgggctatttttgcagctgtcttagcattgattgctagctgcatgttagggtttgcaacaaactccaaaaaagcaagactggctggtgcttacctgtggtacatctcgcccgtctcatttatttgcgtactttccaatatcagtgcgaattcctcgggatatagtaaaaaatggactgtatcttcaataaacttagtagcatatgctgcagctaacttggcaggaccacaaacctttattgctaagcaggctcctaaatatcatggcgctaaggtcgctatggtcgtatgttatgctgttatgatcgtgcttctatctatactgctcatcgtcaatttaagggaaaacaagagacgtgataagatagctgccgagagagggttccctgaagaaacagagaatttagagttttctgatttgactgattttgaaaatccaaatttcagatacactttatga

SEQ ID NO: 29 - DNA, 1596 bp, Saccharomyces cerevisiae
atgtcaaaagttgacgtaaaaattggagcagactcgatctcctcttctgatgaaatcctagttccttcgagactcgctgatgttacgctagcattcatggaggagaatgacgcagcagttccagaaatcacgcctgaacaagaaaaaaaattaaagagaaagctttttctcacaatattcacctttgtctctgccattaaccttttactttacatggacaaagccactttatcctatgattcgattctaggcttctttgaagatacaggtcttacccaaaatacttacaatactgtaaatacgctgttttacgttggttttgcaatcggccaatttcctggacaatacttggctcaaaagttaccacttgggaaattcttgggtgggttgttggccacatggactatacttattttcctaagttgtaccgcatacaacttttccggtgtcgttgcgttgagatttttcttggggctaacagagagtgttgttatcccgatattaattaccactatgggtatgttcttcgatgcttcagaaagagctgctgctcagccatttttctttgcagcatgtatggggtctccaattccaactgggtttattgcttatggtgttcttcatataacaaatcccagcatttcgttatggaaaatattcactatcatcattggtggtttgacttttatcatgacggttgttgtaattctgtggtttcctaataatcctgctgatgtgaaattcttttcaatacaagaaagggtatggattatcaggagagttcaggcatccacaggctcttccattgaacaaaaagtcttcaaaaagagtcaattcagagaggcaatgaaagattatataacctggttatttggattgttttttcttcttcaacagttagccaacaatctgccctatcaacagaacctgctatttgaaggaatgggtggagttgatgctctaggttcgacattggtatcagttgccggtgctggtttcgccgtcgtttgtgccttcatcgctacgttgatgttagcaaaatggaaaaatatttcagctttaacagccatcttttggactttaccagcattggtgggatccatcgctgcagctgctttaccatgggacaataagattggtatcttagcaaatatctgtatggcaggacaaatatttggtattccttttattatagctcttagctgggcaagttcaagtgcatctgggtacaccaaaaaactcacaagaagttcggtgtccttatttgcgatgggaattgctaatatcatatcaccacaaatatggagagagaaggactctcctcgctttttacctgcctggattgttcaaatcgttttatcattctctcttgcaccagccattttgttactgatccatttcatactaaaaagaaggaataatcaaagactaaaaaattatgacgaaaatttacaaaattatttggacagaattcaactcattgaaagcgaaaatccttcttccattgaagaagggaaagtggtaacccacgagaacaatttggcagtctttgatttgactgatttagaaaacgaaacttttatatatcctttgtaa

SEQ ID NO: 30 - DNA, 1605 bp, Saccharomyces cerevisiae
atgagcaacaaatttacaatggagtcacctaagcatttggtggatgatgtgcttttcatatcacccaccaatgatggatcagaagaaaagcctacggaagtcacgttccaggaagatgaaggccatgacgctagcttgcataatcgcagccatgacaagaagtcggaacttgccaccgaacgggaaattatggctactaccacggatgatgacggcatcccctccccttcccatccaatggaaaagcgtgtcttgcgcaaaatggatatatacttgattcctcttatggggatgctatatttcctttctaacctggataaatcgaatattggtaacgcagaagttgcaggtctatccaaggatatccaccttgtaggaacgcaatataacacatgtgtcacagtttttttcgcgacgtatgttcttttcgaccccataggtactaaccttctgaaaattatgggtccgccattaatgatgagtatctgtttgacctgtttcggtgctatttcgctcggaactgcttgggttaagaattatgctcaattgatcgttgtcagactactactgggtgcctttgaaggtatgatttatcccgctattaacatgtacctttcagtctgctatagaagagaacaatatgctctgaggttcgcttttgtcttcagtgcagcctgtttgtcttcatcttttggtgggctgattgcttatggttgttccaaaatcagcggttctctaaaggactggcaatacatttacattgtcgaaggttgtatctctttggggttcgtaccattctatgccttcgggttgagcaaaaatttggaggattcgtggtttttcaataaggaggaaaaagagtacatttccgaaagatacaagactatgaacacttttgacccggacgaaaaatttgaatggttccaagtgtggcaagcagttaaggatgtcaagacttgggctagtgctgtggcattattcggtatcgatttgactacttttggtctaacagtcttcttgccgatcatcattaccagtatggggttcactaatgtcagagctcaattaatgaccgtgcccatctatttccttacagcaattgtgttcttcatttgtgccgtttggtctgatcgtataaagttgagatctccattcatcctgggtgcttgtctgacgacttcgataggcatagctatcgtccttggttctcaagttcatggtgtgagatattttggcgtttacattctttgtatgggtatttacgttaatgctgcctgtaactgtttatggttaagtggtaacactggtaattacttcaagagagccaccgctttaggaattaatctatttttcgggtctggttcagggttggtctctggtcaaatttttgttgccaaagacaagccaagatatatcaaagggctgtcgattagtctggcctttcaagtcttctccatatttatgacggttgtgcaaattttcctatacaagagggaaaacgataaaaagaaagcaataatagatcgctgtaatgaattgggagagcctattccatacgacgaaaggttaagcgacaaaaaccctgagtttaagtacatgtattag

SEQ ID NO: 31 - DNA, 1782 bp, Saccharomyces cerevisiae
atgacaatttcgaataaatcgtggaggagctacttcccacatttgagaaaactacccgaagatgatcagtacttatactcagacgatactaactccagtatcatagctgaagaggagctacatcatagcgtagataagtcctcgaagacagacgttacggcagaaactacagctgtagaacctcatcctcacaatttaaggcatgacttgccatatgaagtgagagatgaagctgggcgtaaatggtggaaatattttgatgaattcgagtatcgtgttaataaggaatacaagaaatcacgtaagtggtacgagtttttgtatcctaatcatactactcaaaccaaggctgaaagacggcttctttacaagctagacattattattgctttatacttttttatgttatgttggtccaagtcagtggatttgaataactacactaacgcatatgtttccaatatgaaggaagatttaaacatgaaaggtaatgattacgtttacacttctactattgctaatgttggtgccattgtcttccaattaccatttatgtatttgttaccaagatttccctctcatattattttgcctgtaatggacttgggctggacttggttcacatttgcatgttatagggcaaactcactagccgaactaagggcttacagatttattttaagtgcctttggcgctgcttactacccagtgtcccaatatatactaggttgttggtatgccccagatgaaattaattcaagagtctgtttattcttttgtgggcaacaattgggttccgtgacttcaggacttctgcaaagtcgcatattcaaaagtttgaacggcgtccatggtctagcaggctggagatggatgtttctgatcgatgccattgcaatttctcttcccacggctattattggtttttttgttattcccggtgtaccatctaagtgttactctttatttctgactgacgaagaaatacgaattgcaagggccagaaataagaggaaccaaatcaaagatggtgttgataaaagtaagctagccccattatggagcagaaaactttggaagaaagtattttgtactccagcattctgggtacttgttgtttttgatacatgttcgtggaataacatgactgcgtatagtggttcatatactttgtggttaaagtctaatacaaagtactccattgcccaagtgaacaacctgagtgttatacccgcatgtttaggatttgcgtatgtgattttttgtgcctttggtgccgatttatttagatgtaagtggatattcatggtttttgctgctataatgaataccgtttcttgtgccttacttatcaagtgggatattccttcgaaagctaaatggtacgctttcttcaccacgtatttcagtgtggccgcatcgccttgtctatggtcgtttattaatgacttcttaaggtttgatcctcaggtgaaggctattacatggatcgccatttattccttctctcaatccacttacgcctggattcctaccttggcgtggcctaccgtggagtcaccacgttttaagactggttacaccgtgagcttaatttttggtgctatttacggtttatggacgtttgttgtactttttttttacaagagaaacgaaaagaaacatgctctaggtaatggtatcatcttgtatgatagtaataagggtgaagagcttccagaatttgtaaagaaaaatatggaggaaagagatggttactactatttaaagcggtcctcgtag

SEQ ID NO: 32 - DNA, 1539 bp, Saccharomyces cerevisiae
atgatgaaggaatcgaaatctatcactcaacatgaggttgagagagaatctgtttcttccaagcgtgccattaaaaagagattacttctgtttaaaatagacttgtttgtgctatcatttgtttgcttgcaatactggattaattatgtcgaccgtgtcggtttcaccaatgcatatatatccggtatgaaggaagatcttaagatggtcggaaacgatttgaccgtgtctaacacagttttcatgattggttacattgtaggtatggtccccaataatttaatgttattgtgtgttccgcccaggatatggctaagtttttgtacgtttgcttggggtttattgaccttgggaatgtacaaagttacatcgttcaaacatatttgcgcaattagattctttcaagccttatttgagagttgcacattttcaggaacacattttgttttgggttcgtggtataaagaagacgaattgcccattagaagtgctatttttacaggtagcggtttggtgggatctatgttcagtggatttatgcaaacaagtatctttactcatttgaatgggcggaatggcttggcgggttggagatggttattcattattgatttttgtatcacattacccattgcaatttatgggtttattttcttccccggccttcctgatcaaacaagtgctgttagcaaattttctatgacgagatacatttttaatgaacaagagctacattatgctaggagaaggctccccgctagggacgaaagcacccggttagactggtcgactattcctagagtcttaaaaaggtggcactggtggatgttctctcttgtttgggttctgggaggtgagaacttgggtttcgcatctaattctacatttgcattatggttacaaaaccaaaaatatacgttggcgcaaagaaataattatccttcggggatatttgccgtaggtatagtttctacgctttgttctgctgtatatatgagtaagatcccaagagctaggcattggcatgtttctgttttcatatcattggtaatggttattgttgcggtactaatacgtgcagacccactaaatccaaaagtcgtcttttctgcacagtatcttggaggcgtagcatacgctggacaagcggtttttttttcgtgggcaaacattatttgtcatgcagatcttcaagaacgtgctatcgttcttgcttccatgaatatgttttcaggggccgttaacgcatggtggtctatattattctttgcttcagatatggtgcccaagtttgagagaggttgctacgccctcttggctacggcaatatcaagcggaattgtctcggtcgtcatacgctcactacagataaaagagaatttgtctaagaaacaggttccttatatagatgctaatgacatgcccggagaagatgacgatgacgacaaccaggataatgaaaatgatggcgacgacgagagtatggaagttgaacttcataatgaggaaatggccgaaatttcaaatcctttccgatag

SEQ ID NO: 33 - DNA, 1782 bp, Saccharomyces cerevisiae
atgtattcaattgttaaagagattattgtagatccttacaaaagactaaaatggggttttattccagtaaagcggcaggtggaagacctgccagatgacttaaattcaacagaaattgtcactatctccaacagtatccagagtcatgaaacagctgaaaatttcatcacgactacaagtgaaaaagatcaactacattttgagactagtagctatagtgaacataaagacaatgtgaacgttactagaagttatgaatatagagatgaagccgataggccatggtggagatttttcgatgaacaagagtatcggatcaatgaaaaggaaagatctcacaataaatggtatagttggttcaaacagggtacctctttcaaagaaaaaaaattattaattaaattggatgtccttttagccttttattcttgtattgcttattgggtgaaatatctggatacggttaatataaacaacgcttacgtttcgggaatgaaggaagatttaggctttcaaggtaatgatttggtgcatactcaagtaatgtacacagttggtaatattatatttcaattgccatttttgatttacctgaacaagctcccattaaactatgttttaccaagcctcgacttatgttggtcgcttttaaccgttggtgctgcatatgtcaattctgtaccacacttgaaagcaattaggtttttcattggggcttttgaagcgccaagttatttggcataccaatatttgtttggttccttttacaaacatgatgaaatggtgcgtcgttctgctttttactatttgggccagtatatcggtattctatccgctggtgggatccagtcagccgtatattcatcgttaaatggtgtaaatggtttagagggatggagatggaactttattattgacgctattgtgtctgtcgtagtgggccttattggattttactccctgccaggtgacccatacaactgttattctattttcttaactgatgatgaaattaggttggcgaggaaaagattaaaagaaaaccaaacaggtaaaagtgattttgaaacaaaagtattcgatattaaactgtggaaaacaattttcagtgattggaaaatatacattttaactttatggaatattttctgttggaatgacagtaatgtttcatctggggcatacctactatggttgaaatctttgaaaagatactctattcctaagctcaatcagttatccatgattactccgggtttaggtatggtttatttgatgcttactggtattattgcagataaattacactctcgttggtttgcgattatttttactcaggttttcaatatcattggtaactccatattagccgcttgggacgtcgcagaaggagccaaatggtttgcatttatgctgcaatgttttggttgggctatggctcctgttttatactcttggcaaaacgatatttgtcgccgagatgctcaaactagagctattactttagttacaatgaatattatggctcaatcatctaccgcatggataagtgttttggtttggaaaacagaagaagctcccaggtatttaaaggggtttactttcactgcatgttctgctttttgtctctccatttggacttttgttgtactctacttctataaacgtgatgaaaggaacaatgccaagaagaacggtattgtgctttataactctaaacatggtgtggaaaagccaacgtcaaaagacgttgaaaccttatcagtatctgatgaaaaataa

SEQ ID NO: 34 - DNA, 1902 bp, Saccharomyces cerevisiae
atgccagacaatctatcattacatttaagcggctcttcaaaaagattgaactctcgccaacttatggaatcttccaatgagacctttgcgccaaataatgtggatttggaaaaagagtataagtcatctcagagtaatataactaccgaagtttatgaggcatcgagctttgaagaaaaagtaagctcagaaaaacctcaatacagctcattctggaagaaaatctattatgaatatgtggtcgttgacaaatcaatcttgggtgtttctattctggattcatttatgtacaaccaggacttgaagcccgtcgaaaaagaaaggcgggtttggtcctggtacaattattgttacttctggcttgctgaatgtttcaatatcaacacttggcaaattgcagctacaggtctacaactgggtctaaattggtggcagtgttggataacaatttggattgggtacggtttcgttggtgcttttgttgttttggcctctagagttggatctgcttatcatttgtcattccctatatcatctagagcatcattcggtattttcttctctttatggcccgttattaacagagtcgtcatggccatcgtttggtatagtgtccaagcttatattgcggcaactcccgtatcattaatgctgaaatctatctttggaaaagatttacaagacaaaatcccagatcactttggatcaccgaatgctactacttacgagttcatgtgtttttttatcttttgggctgccagtcttccatttttactggttccacctcacaaaattagacacctgtttactgttaaagccgtcttggttccgtttgcttcttttggtttcttaatttgggctatcagaagagctcacgggcgtattgccttaggatctttaaccgatgtacaacctcatggctctgccttttcgtgggcttttctaagatcactaatgggttgtatggctaatttctccacaatggtaatcaacgctccagatttctctagattttcaaaaaaccctaactccgctttatggtcccaattagtgtgcattccatttttgttttccatcacttgtttaattggaattctagtcaccgcagctggttatgaaatatacggtattaattactggtcgccactcgatgtgctagaaaaatttttacagactacttataataagggcacaagagctggtgttttcttaatctcttttgttttcgccgtagctcagttaggtactaatatttctgcaaactcattatcgtgtggaactgatatgtccgctattttccccaagtttatcaatatcaagcgtggttcattattttgtgcagccatggcgctgtgtatttgtccatggaatttaatggcaacatcaagtaaatttacaatggctttgtccgcatatgctatctttttgtccagtattgccggtgttgtctgctcagattactttgttgttagaagaggatatatcaagctaacacacatatattcccatcaaaagggctctttttatatgtacggaaacaggtttggtatcaattggagagctttggctgcatatctatgtggggtggctccttgcttgcccggtttcatcgcggaggtgggcgctcccgctataaaggtttctgatggagctatgaaactatattacctaagttactgggtaggatatggcttgagtttttcttcttatactgctctgtgttacttcttccctgtacctgggtgccctgttaacaacattataaaggacaagggctggttccaaagatgggccaatgtcgatgattttgaagaagagtggaaagacacaattgagagggatgacctggtagatgacaatattagtgtctacgaacacgaacacgaaaagactttcatttaa

SEQ ID NO: 35 - DNA, 1908 bp, Saccharomyces cerevisiae
atggctaacgacgctctaagtgctattttcagtaatccttcgaggaaaggtgtccaaccctccacatctattgtgtcatatacaaacaatgaagatgatattatagatgtggaaaatgggaagttcaacaagaacaagaatatcaacactaatgtgtatgtggacaactcctcaatagaggagagcgaagtcgtgcccttgcccgaaacaaagtccatctggagtaaaatatactacgatttcattgtgttagacaagacaactttgaatgtttcgttgaaagagtcgttcttgtataacagagacttgaaaccggttgaagaagaaagaaggtgttggtcctggttcaattacttatatttctggctggcagactgtttcaatattaacacatggcaaatagctggtacaggtctacaactaggtctgaattggtggcaatgttggcttacagtttggatcggctacacttttgcaggtatcttcgtagtattgaactcgagatttggttccgcatatcacttatctttccctattactgttagggcctcatttggtatattcttttctatgtggccgattataaatcgtgtcgtgatggctatagtatggtatgccgtgcaagcctggttaggtgcaacgcccgtggcactgatgctaaaatctatttttggcaagaatctggaagatagaatcccaaaccattttggttctccaaatagcactacttttgaattcatgtgtttctttatattttgggtggtcagtataccatttgtcctagtggctcctcataaaatcaggcatttattcacagtaaaagcagctttgatccccttcgcagcctttggatttttaatctgggctttgaagaaatcgcacggtaaaattgagttggggacgctgaatgattattcacctcatggttccgaattttcatggatattcgttagatccctaatggcctgtgttgctaactttgccgctttgattatcaacgcccctgacttcggtagatttgccaaaaatcctcaagcgtctttgtggccacaattggttgccatcccattgttcttcgccataacatgtttgatcggtatcattgttactgcggccggttatcacttatatggggttaactattggtcaccactggatgtacttggtcaatttttggagaccacttacaccagaggtactagggctggtgtgttcttgatttcttttgtatttgccttagctcaactgggtacaaacatttctgccaactctctggcatgtggtgctgatatgacggctttgtttccaagatatattaatattagaagaggttctttattctgtgtggcaatggctctatgtatctgtccatggaacttaatggccagttcaagtaagttcaccagcgctttgggtgcttatgcaattttcctttccagtattgctggtgtcatttgcgcggattatttcgtagtaagaagaggatatgtgaaattaacacatttattcctggcacagaagggttccttttacatgtttggaaacaaatttggtgccaattggagggcctttgttgcgtatatttgcggtatcgctccaaatttaccaggttttataggtgatgttggagctccaaaaattacggtttcagagggtgcaatgaggttatactatttaggttatccggtaggtttctttattagtgcggtgatatacctcatattatgttacttttttcctgtccctggtactcccgtaaccaattttctgacagagaaaggatggttccaaagatgggcttatgttgaggacttcgagcaagattggaagaatgagttacgtagggatgacctctgcgatgacacagtcagtatctatgatggcaccgaggaaaagatagtttactaa

SEQ ID NO: 36 - DNA, 1920 bp, Saccharomyces cerevisiae
atgccggtatctgattctggattcgataattcttcaaaaacaatgaaggacgacactataccgacggaggattacgaagaaatcacgaaagagtccgagatgggtgatgcgactaaaattacttctaagattgatgctaatgtcattgaaaaaaaagataccgattcagaaaacaatataaccattgctcaggatgacgaaaaggtgtcttggctgcaaagagttgtcgagttttttgaggttaagaatgactctaccgatttggccgatcataagcccgaaaatccaattaggacatttaaagatttacaggagtccctccgttcgacgtacttgtacaacacagatctgcggcccgtggaggcaaaaagaagaacgtggacatggaagcagtacattttcttttggatttctgggtcctttaacgtcaatacatggcaaatctcagccactgggctacagttagggcttaactggtggcagacttggatctgtatttgggttggatacacgtttgtcgcatttttcttgatactgggttccaaagtggggaacaattaccatatctctttccccatttcctcaagagtatcatttggtatctacttctccatctggattgtcatcaaccgtgtcgtcatggcatgtgtctggaattctactttggcttatatcggtagtcaatgtgttcagttgatgctaaaggctatcttcggtactaatttgaatactagaatcaaagacaccataaagaaccccaatttgacgaacttcgagttcatgtgcttcatggtcttctgggtcgcatgtttaccgttcctatggtttccacctgacaaattgcgtcatatatttgcactcaaatccgccatcactccatttgcggccttcggttttttgatttggactctttgtaaggccaaaggtcatttggcattgggttccctaaatgacaatggtggcgcaatcagcaagacggttttagcatggtctgtcattagagctattatgagtgctctggataacttctctactttaatcctaaacgctcctgacttcactagattcggtaagacctacaagtcatctgtttactcgcaattgattgcgctacccgtctgctatgccattatttccttaatcggaatattgtctgtctccgcagcttatacattgtacggagtaaattattggagtcccctagacattctgaacaggtacttggataactatacttcggggaacagagccggtgtattcttaatatctttcatttttgcgtttgaccagctgggtgccaacttgtctggtaactcgatccctgcaggtaccgatctgactgcattattgcctaaattcatcaatatcagacgcggttcttatatttgtgctctaatatcgttggcgatttgcccctgggatttattatcatcatcgtcaaagtttactacggcactagcggcatatgcagttttcttaagtgctattgcgggtgtaatatcagccgattacttcattgtcagaaagggttacgttaatattttccattgctacaccgacaagccaggatcgtactacatgtacaataaatatggtacgaactggagggcggtggtagcttatatatttggtattgctcctaattttgcaggctttttaggttcagtgggagtttctgtgcctattggcgctatgaaagtttactacctaaactatttcgttggttatctccttgcagcattgagttactgcattttagtgtatttttacccaattaagggtattccaggcgatgccaagataactgaccgtaaatggctcgaagagtgggtcgaagtagaagaattcggaactgaaagagaagcttttgaagaatatggcggcgtttccactggctatgaaaagatacgatatatctaa

SEQ ID NO: 37 - DNA, 1797 bp, Saccharomyces cerevisiae
atgagtttcggtagtaaagtctccagggctttgagatttttggaaattcctgtcaaagacagggcatctgtgagtttcttgaagaacccggatttgcaacctattaagtcggctaaccaaacatgggggttctggtctaattttgcatattggggtgttatgtccttttcagtgggtacatggatgagtgcctcttctgcactaggtgttggattaagttacccagaaaccattggtacatttatcgtcggtgatgtgttgaccattattttcacattggcaaactcgtgtcctggttacgactggaaggtcggtttcactttggcccaaagattcgtctttggtatttacggttctgccttcggtatcatcatcagaattttgatgagtattgtcaactacgggtccaacgcttgggtgggaggtctttgtatcaatatgatcttggattcatggtctcaccattatttgcacctgccaaacaccttatcttcgaaagttgccatgaccactaaagaattaattggttttatcatcttccacgtccttactgcattctgttacttaatgaaaccctaccacatgaactacattttaatttggtcgtgtgttgctacatttttctctatgttgggtatggtgatctatttagctaaacaggctcacggtgttggagaattgtttacctccactaaatccactgccactggctccaccaaagcttgggcttgggtttatatgatctcgtactggttcggttccgtttctccaggttccaccaaccaaagtgattactcgagatttggttcctccaattgggctatctgggccggtaccatctgtgcattgttaattccaaccactttaatcccagtttttggtgttattggtgcctccacctgtgacaaactatacggtgaacaatattggatgcctatggatatcttcaaccattggttgacaactaactattctgcaggtgctcgtgccggtgcgttcttctgtggtctttcatttgtcctatctcaaatgtcctacaccatctccaactgtgggtttgccagtggtatggatttggccggtttattacccaagtatgtcgacatcaagaggggtgccctttttgccgcatgtgtctcctgggcttgtttgccatggaacttctacaactcttcttctactttcttgactgtcatgagttctttcggtgttgtcatgactcctatcatttctgtcatgatttgcgataacttcttgatcagaaaaagacaatactccatcactaatgcctttattctcaagggtgaatactatttcactaagggtgttaactggagagctattgttgcctgggtttgtggtatgacccccggtctacctggtattgcttgggaagtcaataatgactatttccacaacactggtattgtcaatttcttttacggtgactccttcttctcgtttttgatctcctttttcgtctattggggactatgcctcctcttcccattcaaaattactgtcaaacatgatgacaaagattattatggtgcctttactgacgaagaagcaagaaagaagggcatggttccatacagtgaaatttctgaagaagaaatccgcgcttacacattaggcgaaggttacactaccggccacgagtacagacctgaaggctccgacgatgaaatacctgagttggtcaaaactagctctgaaaacaccaatgagtttgaaatagttcatcataagaataatgaaaagcaatcctccaccgccagtgaaaaagctgcttag

SEQ ID NO: 38 - DNA, 1800 bp, Saccharomyces cerevisiae
atgagtttcggtacgagaatctccagggctttgagatttttggaaattcctgttaaaaatagggcctccgtgaattttttaaggaaccctgatttgcaacctatcaagtctgttaatcaaacgtgggggttttggtctaattttgcgtattggggtgttctgtccttcaacgttggtatgtggataggcggttcgtctgcattaactgttgggttaagttactcagagaccatcggtgcgtttattattgctgatttgttgaccatcctgtttgctttagccaactcttgtcctggctatgactggaaggtcggcttcactctagctcaaagattcgtctttgggatttacggttcagctcttggtatcattatcagaatattgatgagtattgtctattatggttccaacgcttggttaggtgggctttgtgtaaacatgatattagattcttggtctcaccactatttgcatctgcccaatactttgtcctcgaaagttgccatgaccaccaaggaattgatcggcttcattatcttccatatccttaccgcgttctgttactttatgaagccataccatatgaactatattttaatttggtcgtgtgttggtactttcttcgccatgttgggtatggtaatttacttaactaagagcgcacatggtgttggtgacttgttcacttctactcattccacagttactggctctaaaaaggcttgggcttgggtttatacgatctcgtactggtacggttctgtttctccaggctgtaccaatcaaagtgacttctccagatttggttcctctaattgcgctatctggactggtactatagttgctttactaataccagcaaccttgatcccagtattcggtatcattggtgcttctgcttgtgaaaaattatacggtcaaacattttggatgcctatggacatctttgacaactggttgacaactaactattctgcaggcgcgcgtgcagctacattcttctgtggtttttgttttgtaatgtctcaaatttcatataccatctccaactgtgggtttgccagtggtatggatttggctggtttattaccgaaatatgttgatattaagagaggtgctatttttgccgcatgcgtctcctgggcctgtttgccatggaacttttacaactcttcttctactttcttgactgttatgagctctttcggtgtcgtaatgacacctattatcactgtcatgatctgtgataatttcctcatcaggaagagacaatactccgttaccaatgcctttgttctaaagggtgaatactattttaccaagggtgtcaactggagagctatcgttgcctgggtgtgtggtatggctcccggtctacctggtatcgcttgggaagtcaataatgactatttccacaacactggtattataaattttttctatggtgattctttcttctcctttttgatttcctttttcgtctattggggactatgcctcctcttcccattcaaaattactgtcaaacatgatgacaaagattactacggtgcgtttaccgacgaagaagcaaggaagaagggcatggttccatacagtgaaatttctgaagaagaaatccgtgcttacacattaggcgaatgcttcacaagtggacacgaatacaaacctgagagctccgatgatgaactacctgagttgacaaaaactagttcagaaaacacaaaagtgtttgaaattgttcatcagaaagataatgaaaaggaatcctctacttccagtgaaaaacaaattgcctaa

SEQ ID NO: 39 - DNA, 1797 bp, Saccharomyces cerevisiae
atgagcttcagtagtatagtctctaagtttttgagatatttagaaattcctgccaaaaataggactgccgtgaattttctgaggaaccctgatttgcaacctatcaagtctgcaaatcaaacatgggggttctggtctaatttggcgtactggggcgctgtgtcctttacagcaggtacatggatgagtggttctgctgcactaagtgtcggcctaagttacccagagaccattgtttcgtttcttctcggtaatgtcttgaccattattttcactatggccaactcttaccccggttatgattggaaaatcggtttcaccttggcccaaagattcgtttttggcatttacggttcagccttcggtatcatcattagaattttgatgagtattgtcaattatggttccaacgcttggttgggtggtctatctatcaacatgatattagattcctggtcccaccactatctgcacctgcccaatactttgtccccaagtgttgccatgaccaccaagcagttggtcggcttcattattttccacgtcctcaccgcgctctgctatttcatgaaaccctaccatatgaactaccttttaatttggtcatgtgtagctacttgctttgccatgctgggtatagtgatttacttgactaagaatgcccatggtgtcggtgaattgtttacctccacaaaatctaccgttactggttctaaaagagcatgggcttgggtttacatgatttcatactggttcggttccatttctccaggttccaccaaccaaagtgactattcaagattcggttcctccaatttggctatctggaccggtagcgtctgtgcattactaatcccagcaaccttggtcccaatcttcggtgtcattagtgcctccacctgcgacaaattatacggtaaacaattttggatgcccatggatatattcgattattggttgacaaacaactattctgcaggcgctcgcgcaggtgccttcttctgtggtctttgctttaccatgtctcaaatgtcctccaccatctccaactgtgggtttgccactggtatggatatggccggtttgttgcccaaatacgtcgatatcaagagaggtgctcttttttgcgcatgtatctcctgggcttgtttgccatggaacttctacaactcttcttctactttcttaactgtcatgagttctttcggtgttgtcatgactcctattattgctgtcatgatctgtgataactttctgatcaggaagaggcaatattccattactaatgcctttattctaaagggtgaatactattttaccaagggtgtcaactggagagctatcgttgcctgggtgtgtggtatggctcccggtctacctggtatcgcttgggaagtcaacaataactatttccacgactcaggtattgttaaattcttttatggtgattctttcttctcctttttgatttcttttttcgtttactgggggctatgtgtcttcttcccattcaaaattactgttagacatgatgacaaagattactatggtgcatttaccgacgaagaagcgagaaagaagggcatgattccatacagtgaaatttctgaggaagaaatccgtgcttacacgttaggcgaatgctacacaactggacacgaatacaaacctgagagttctgataacgaatcacctgaattgatcaaaactagctcagaaaacactaacgtatttgaaatcgttcaccaaaaggatgatgaaaagcactcctttagtaccactcaacaagttgtctga

SEQ ID NO: 40 - DNA, 1602 bp, Saccharomyces cerevisiae
atgttggaagagggaaataatgtttacgaaatccaagacttggagaagagatctcctgtaataggctcaagcttggaaaacgaaaagaaggtagccgcttctgaaactttcacagcaacttccgaagatgaccaacagtatatcgttgaatcatcagaggccacaaaattatcgtggttccataagttctttgccagtttgaatgcagaaacaaagggtgttgaaccagttacagaggatgaaaaaacggacgattccatactgaatgctgcgtccatgtggttttcagctaatatggtcattgcatcatatgctttgggtgccttaggacccatggtgttcggtctaaattttggtcaaagtgttttagttatcatatttttcaatataatggggttgatatttgttgcgttcttttctgtctttggtgcagaactgggcttaagacagatgattttatcaagatatctggttggtaatgtaacggcaagaattttctctcttattaacgttattgcttgtgtcggttggggtattgtgaatacctcagtatccgcacaactgctgaatatgatgaatgaaggctccggccacgtctgtcctatttgggccggttgtctgatcattattggtggtaccgtgcttgtgactttttttggttacagtgtcattcatgcatacgagaaatggtcatgggtacccaattttgccgtctttttggttattattgcccaactatcgagatcaggaaagtttaaaggtggtgaatgggtaggaggtggaactactgcaggtagtgttctttcttttggttcatctattttcggttttgccgcaggatggacgacctatgcagctgactacactgtttatatgccaaagagtacaaacaagtacaagatttttttctccctagttgctggtctagcgttccctctatttttcaccatgattcttggtgctgcttctgctatggctgctcttaatgacccaacctggaaggcatattatgacaaaaatgctatgggtggtgtcatatatgctatcctggttcctaactctctgaacggatttggtcaattctgctgcgttttgttagctctgtccactattgcaaataatattccaaatatgtatactgttgctttatccgctcaagctttgtgggcacctttggctaaaataccaagagtagtctggacaatggcaggtaatgctgccactttaggtatttccatccctgctacctattactttgatggctttatggagaatttcatggattctatcggttactacttagctatttacattgccatctcatgttcagaacatttcttctacagacgttccttcagtgcttacaatattgatgattgggataattgggagcatctacctatcggtatcgcaggtactgctgccttaattgttggtgccttcggtgttgcattgggtatgtgtcaaacctattgggttggtgaaattggccgcttaattggtaaatatggtggtgacattgggttcgagttgggtgcaagttgggccttcatcatctacaacatcttaagacctttagaattaaaatacttcggtcgttag

SEQ ID NO: 41 - DNA, 1740 bp, Saccharomyces cerevisiae
atgaatagggacaacatggacacaacaaagcgcaaagaagatcatacaaagcatactactgatgtaatagaattttacgaagaaggaaccgcagcttcttctttaaacatagccacagaaaaggccaactcaagtccgtccattttgagaagaattatcaacagggcggcatggctttctaagaaagtggacgcaatgggagtagagtctaccggtattcagaggatatctccctatgaacgaggaacatcaaagaaacaatttttgcatgtcgcggggctatggttgagtgccacaggtggtttgtcttccatgtcgtcgtttttattaggccctctgcttttcggtttaagctttagagaatccgtagcctccagtttaatatcggtaacaattggttgcttaattgctgcctattgctcgatcatgggaccgcagtccggttgcagacagatggtaacagctagatacctgttcggatggtggtttgttaaattagttgcattagcttccattatcggtgtcatgggttggtctgtggttaattccgtggttgggggtgaaatgttagctgctatttctaatgataaagtacccctatgggtagggattgtcatagtgaccgtatgctcctttttagttgccattttcggtatcaaacaagtcattaaagtggaaacttacttatccgtacccgtcctgacagcatttttactactgtacatttcatcaagtgataaatacagcttcgtcaatgcatacgtttcaaagggaaatttggactcttccacccgaaagggcaactggatgagttttttttcattatgctatagtattacggctacttgggggtctattacagcagactattatatattgttcccagaagatacaccatatattcaaattttttgcctaacgttttttggaacatttttgcctacctgtttcgtcggaatcttaggtctcttactagcttctgttgccatgtcgtataagccttggtcagtcgagtacgattcccatggaatgggtggtctactttgggcaggttttcagcgttggaacggcttcggaaagttctgcgtggtagtactggtattcagtttggtatccaacaacatcatcaatacgtattcggcagcattctccatccaactttctagtgtgttttgtgcaaaaatccctcgctggttctggtctattgtttgtactataatttgtttggtatgcgcattaataggtcgtaatcattttagtactattttgggaaatttcctaccaatgataggctactggattagcatgtactttatcttattattcgaagagaatttagtattcagaaggtttttcttacatttgtacaccaaagagtttcctacagttacaggagaaataaatggaccggaacttgttggatcttcaaaagaagtggagaaagatgcagttactaatatccatttgttaaaaagaaaacataaggtgactaaacatcgttacaattgggacaaatgggaagattatgaggttttaacgcacggttatgcagcaacatttgcgtttattgtaggagttgctggtgtggtagttggtatggcgcaagcctattggattggcccaattgctgccaaatttggtgaatatggtggtgatgtcgcaatgtggttaagtatggcgttctcaggtgttgtataccctccttgtagatacttagagctacgtaaatttggtcgttaa

SEQ ID NO: 42 - DNA, 2208 bp, Saccharomyces cerevisiae
atgggagaatttaaacctccgctacctcaaggcgctgggtacgctattgtattgggcctaggggccgtatttgcaggaatgatggttttgaccacttatttactgaaacgttatcaaaaggaaatcatcacagcagaagaattcaccaccgccggtagatctgtaaaaacccggcttagtggctgcagcgtggtttctagttggatctggtgttctacattgttaacgtcgtcaacaaaggaatatgcagacggtatatttggcggttatgcgtacgctgctggcgcatgcttccaaattattgcattcgcaattttggcaattaaaaccaagcaaatggctcccaatgcgcacacatatttagaattagtgagaacaagatatggtaagatcggccatggttgctacttgttttatgccatcgcgacgaatattttagtcacttcaatgcttttaacttcaggttctgctgtctttagtgatttaaccgggatgaacactatcgcatcatgttttttactgcctgtgggtgttgttgtttatactctatttggtgggattaaagcaactttcttaacggactatatgcacacatgtgtcattatcatcattgtcctcgtatttgcctttaaagtttatgcgactagtgatgttttaggctcaccgggaaaagtttatgacttagttcgtgaagccgccaagaggcatccagtagacggtaactatcagggtgaatatatgaccatgacatccaaatccgctggtattttattaattattaacctgattggaaatttcggcaccgttttccttgataatggttattggaataaagcgatttctgctagtcccgcagcgagtttgaaagcatatgccatcggtgggttagcatggtttgcagtaccttctttgatttcattgaccatgggattagcatgtcttgcggtggaaacgtctccgaacttccccacctatcctgatccacttacttcgttccaggcaaattctgggttagtcttgccggcagctgcaattgctatcatgggtaaggggggtgctgtggcatcgctgctaatgattttcatggccgtcacatctgctatgtctgctgaactaattgccgtttcatctgttttcacttacgatatctatagagaatatattgatcctcgtgcaagcggtaagaaattgatttacacatcacacgttgcttgtatcttttttggtcttgccatgagtggattttcggttggtttatactatggtggtatttctatgggttatatctatgaaatgatgggtataattattagtagtgcagtattacctgtcgttttgaccttatgttccaaagacatgaatttggtggccgctgtagtgtcgcctattttgggcacaggactggctataatgtcatggcttgtctgtaccaaatccctttataaagaattgaccgtggatactacgttcatggattatccaatgttaacaggtaacttggtggctttgctatcaccagccatttttattcctattttaacgtatgtgtttaagccacaaaattttgactgggagaaaatgaaagatattactagagttgacgaaactgcagagttagttcaggctgaccctgatatccagctttacgatgctgaagctaacgataaggaacaagaagaagaaacaaattctctggtctcagatagtgaaaaaaacgatgttagagtaaataatgaaaaattgattgagcctaaccttggtgttgtaataagtaatgccatttttcaagaagatgacacacagttacaaaatgaattagacgaagaacaaagagaactagcacgtggtttaaaaattgcatacttcctatgtgtttttttcgctttggcatttttggtagtttggcccatgcccatgtatggttccaaatatatcttcagtaaaaaattctttaccggttgggttgttgtgatgatcatctggctttttttcagtgcgtttgccgtttgtatttatccactctgggaaggtaggcatggtatatataccactttgcgaggcctttactgggatctatctggtcaaacttataaattaagggaatggcaaaattcgaacccacaagatctgcatgtagtaacaagccaaattagtgcgagagcacatagacaatcatcacatttcggacaagttgatgaaataatttag

SEQ ID NO: 43 - DNA, 1806 bp, Saccharomyces cerevisiae
atgctcaaccatcccagccaaggctcagatgatgctcaggacgaaaagcaaggcgacttcccggtcatcgaagaggagaagacccaggctgtaacgctgaaggattcgtatgttacggacgacgtcgccaactccacggaacgctacaacttgtccccttctccggaggacgaagacttcgaaggccccactgaagaagaaatgcagactttaaggcacgttggtggtaaaattcctatgaggtgttggttaattgctattgtagagctttccgagagattctcctactacgggctttccgcaccattccaaaactacatggaatatggacctaatgactccccaaagggtgttctgagcttgaacagtcagggtgccactgggttgtcgtattttttccagttttggtgttacgttacaccagttttcggtggttacgttgcggacaccttctggggtaaatataatacaatttgttgcggtaccgctatttacattgccggtattttcattctatttatcacttcgattccctccgttggtaacagagacagtgctattggtgggttcattgctgccattattctgatcggtattgccactggtatgattaaagctaacctttccgtgttgattgccgaccagcttcctaagcggaaaccctccatcaaagttttaaaatcgggcgaaagagtcattgtcgattcaaatattactttacaaaacgtttttatgttcttctatttcatgatcaatgtcggttctctatcattaatggccactactgaattggaatatcataaggggttctgggcggcctatctattgcccttctgcttcttttggatcgctgttgtcactttgatttttggtaaaaagcaatacattcaaagaccaatcggagataaagtcatcgctaaaagttttaaagtttgttggattttaactaagaataagttcgacttcaacgctgctaaaccttctgttcatccagaaaagaactatccatggaatgacaaatttgttgatgaaattaagagagctttggcggcttgtaaagtctttatattctacccaatttattggacccaatacggtaccatgatttccagtttcatcactcaggccagtatgatggaattacatggaattcccaacgatttcttacaagcattcgattccattgcgttgatcattttcatcccaatttttgaaaaattcgtatatcctttcattagaagatacactccactaaaaccaattacaaaaattttcttcggtttcatgtttggatcttttgccatgacatgggctgctgttctacaaagtttcgtttacaaggctggtccatggtataatgaacctctgggtcacaacaccccaaatcatgtccacgtttgctggcaaatacccgcatatgtcttgatttctttttcagagatctttgcctctatcactgggttggaatacgcttattccaaagccccagcttccatgaaatcgtttattatgtccattttcttattgactaacgcctttggttctgcaatcggttgtgcattgtccccagtgaccgttgatcctaaatttacatggttattcactggtttggctgttgcctgctttatttctggttgtttgttctggttgtgcttcaggaagtataatgatacagaggaagaaatgaacgctatggactacgaagaagaagacgaatttgatctcaatccaatttccgcacctaaagctaacgatattgaaatattagaaccaatggaaagtctaagatccaccaccaaatattag

SEQ ID NO: 44 - DNA, 2400 bp, Saccharomyces cerevisiae
atgagtaccatttatagggagagcgactcgttggagtcggagccctcgccaacgccaacaaccattcctatccagatcaatatggaagaggaaaagaaagatgctttcgttaagaatattgacgaggacgtcaataatctcactgcgactactgatgaggaggaccgcgatccggaaagccaaaaattcgacaggcattccatacaggaggaaggtctcgtttggaagggcgaccctacatacttgcccaattctccatatcctgaagtgagatcggcggtgtccatcgaggatgaccccaccatccgcctcaaccactggagaacgtggttcttgaccacggtgtttgtggtagttttcgccggtgttaatcaatttttttccctgagatatccatcgctagagatcaacttccttgttgcacaagttgtttgctacccaattggtaggatactggctctcttgcccgactggaagtgttctaaagtgccatttttcgatttaaacccgggcccatttaccaaaaaggaacacgccgtggtcacaattgccgtggcgcttacttcctctactgcatacgctatgtacattttgaacgcccagggaagcttttacaacatgaaacttaatgtcggatatcagttcttgttggtttggacatctcaaatgattggttatggtgctgcaggtcttaccagaagatgggtcgtcaaccctgcaagctctatctggcctcagactttaatttcagtgtccttgtttgattcgttgcactcgagaaaagttgaaaagacagtcgcaaatggttggacgatgccccgttacaggttcttcttaatcgtccttatcggatcgttcatctggtattgggtacctggattcctctttaccggtctgtcctatttcaacgttatcctatgggggtcgaagacaagacacaatttcatcgctaacacaatctttggtactcaaagtggtctcggtgcgttgccaattacatttgactacacccaggtttcccaagccatgtccggctctgttttcgccacaccattctacgtctccgccaacacctatgcatcagtgttgatattcttcgtcatagtgctgccatgtctttattttacgaatacctggtatgccaaatacatgcccgtcatttcaggttctacttatgacaacactcaaaacaaatacaacgtaacaaagattcttaacgaggattattccattaatcttgagaaatataaggaatactcaccggtattcgttccattttcctatcttttgtcgtatgctttaaattttgccgctgttatcgccgtttttgtccactgcatcttataccacggtaaagatattgtcgccaagtttaaagaccgtaaaaatggtggcactgacattcacatgagaatctactccaagaactataaggattgtcccgattggtggtatttacttttgcagattgtcatgatcggtttaggatttgtagcagtgtgctgtttcgatactaagttcccagcttgggcatttgttattgcaatattaatttcccttgtaaatttcatcccgcaaggtatcttggaagcaatgactaaccaacacgtaggtttgaatattatcacagaattgatctgcggttatatgctgcctttaagaccaatggcaaacttattattcaagctatacggatttattgtcatgagacaaggcttgaatttgagtagagatttgaaattagccatgtacatgaaggtttcccctcgtttgatctttgccgttcaaatctatgccactatcatatcaggcatggttaacgttggtgtccaggaatggatgatgcataatatcgatggcttatgtaccaccgatcaaccaaatggcttcacttgtgctaatggtcgcacggttttcaatgcttccattatctggtctttgccaaagtatcttttctcatcagggcgcatttataatccgctgatgtggttcttcttgattggtttgctattcccactagccgtttatgctgttcaatggaaattccctaaatttaaatttgctaagcacattcatactcctgtatttttcacaggcccaggtaatattccaccaagcacaccttataactactcattattttttgcaatgtcattctgcctaaacttgataagaaaaagatggagagcttggttcaataagtacaatttcgtcatgggggccggtgttgaagcaggtgtggcaatctccgtcgtcatcatcttcttgtgtgtacagtacccaggtggtaagctcagctggtggggaaacaacgtttggaaaagaacgtatgataatgattataaaaaattttataccttaaagaaaggtgagacatttggttatgataaatggtggtaa

SEQ ID NO: 45 - DNA, 2634 bp, Saccharomyces cerevisiae
atgagtgaaacagtcaaagataaagttataattgatgagaaggtatccacaaaaggtactgttgattacgccgagggtgctgagtattctgagaggctttcaaatcattcatcagacttttctcagtggtatacggatgaacagatactgcactttatgaagaagctgggttatgaaaatcgcactctttatgatattccggaagacgttgcgtatatcctcaaaaaaatgcctgaattgacacttgaggattccttcaaaatactaaaagactctatcatctatttcaaggatgatgagaacattccacacgatcaatatgaggagtggaagagattggttgacttggaggacttggattcaaaagaggggatagatgaatatgatagctttgacattagagcatttgcttctgctattaaatttcattcgccttaccaagaggttagagctgttgttgatccagaagatgatcccaccattccagtggagacattccgagcatattttctggcaataatttggtctgtcatcggttcaggatttaatgagtttttttcacacagggtggtttcaatttcactgaatactccaattatccaaatgtttttatatatctgtggtaaggcttgggctaaaactatcccctgttggactataaccatcaggggcagaaagtatggtatcaatatcgataaaccatggacccaaaaagagcaaatgttttcaaccttgttatatgcaatttgtcaaggcgcgttctatactcattacaatattctaacgcaaaaactcttttaccattctgctttctcgtttggctaccaatttttactttcgttatccgtacaatttattggatttggatttgctggcatccttagaaaattcgttgtttatccagcccgtgcactatggccaacagtcatgccaactattgctatcaacaaggcactattgggtaaagaaaagcatgaatctggaatgagcaggtataaattctttttcttgactttttttatcatgttcatctataactggtttcccacttacattattaatattctaaacactttcaattggatgacctggatcaagccaagtaacattaatctcgcaaacatcacgggaggagtcactggtcttgggattaatcctatctcatcttttgactggaatgttatttcgtttaattctcctttagtttacccattttggtcatacttaacacaatatcttggttgcatattagcagctttaattgttattgcagtatactatagtaattatatgagttgccaatacctgccaatattcacaaattctttgtatactaatactggccattcctttaaagttactgaggtattagacagtgacaataagctagatgtgaaaaaatatcaaagctactcgccaccatactatagtgctggaaatttggtatcatatggtgctttcatttgcgcatatcctctgatgattacatggtcgtttattgtacactcaaagttattgttcaatgctttcaaagattgggctttgaatttgtgggccatgagaaaacttaaatcttgggtcacaatgttcaaaagcgattacagggcgctcgacgattatgatgacccacattctaatgccatgaaaaactataaagaagttccagattggtggtattttgccatattgataggttcacttgttgttggaatagctgttgtagagcactacccaacaaatacaccagtttggggtctttttgtttgtttaggatttaattttgttttcttgattccaactactatccttcaagcaaccactggttattcgtttggtttgaatctactaattgaaatggtgatggggtacgctttaccaggtaatccaatcgccataatgattttgaaggcttttggttataacatcgacggccaagcagataattacgtttctaacttaaaaatagcgcattattgtaagattccgccaatggcgctattcaggggacaatgtgttatagttttcattcagatatttgtcaatctaggtgttctgaattggcaaatctccaatatcaaagacttttgcacacctcatcaaaacgcaaaattcacctgtcctgatgctgtgacctactataatgcttccgttgtctggggtgcaattgggccaaaaagaattttcaattacatttatccaatatttaaatggtgttggttgataggcgcatgcattggcatattttttggtgtttggaagcgctggggtaagttttatcccagatattttgacccaatgttatttgtaggtggaatgcttaatatgagccctccatataacctgatgtattacacttctggtatgattgttagttacatttcccagtactacatgaaaagacaccatttaaatctgtgggagaaatataattatgttttatcggcaggcttttcaacgggcttggttttatcagctattatcattttctttgctgtccaatataaagacacagcttttaattggtggggcaatacagttccgtatgctggtgccgatggcgttggctatcctctaaagaacataactgatacagcaaatggctatttcggctatgctccaggacactatccatga

SEQ ID NO: 46 - DNA, 828 bp, Saccharomyces cerevisiae
atgacatcgtctgcttcttctccacaggatttggaaaagggtgtgaacactctagaaaatattgagacgctcccccagcagggttcgattgcaggcgtttcgcagggcttccctaatattcaagagatatactccgacagagacttcattactctaggatcctccacctacaggcgcagagatttgctcaatgcactagacagaggggatggggaggaaggaaactgtgcaaagtatactccgcaccagttcgctaatccggttcctttgggtctcgcatcgttttctctgtcatgtctagttctgtcgctaattaatgcgaacgttcgcggcgtcactgatggtaaatgggcgctaagtttgtttatgttttttggtggtgccattgaattgtttgccgggttattgtgttttgtcattggggacacatacgccatgactgtgttcagttctttcggcgggttctggatctgctacggttatgggctaacagatactgataatttggtcagcggctataccgatcccacaatgttgaacaatgtcattgggttcttccttgcgggctggaccgttttcaccttcttgatgttgatgtgtacattgaagagcacgtggggtttgttcttactattgacgtttttggatcttaccttcctactactgtgtatcggcaccttcattgacaacaacaatctcaaaatggccggtggctattttggaattttaagtagttgctgcggttggtattcgctatactgttctgtggtgagtccttcaaattcttatttagccttcagggcgcacacaatgccaaatgctccttaa

SEQ ID NO: 47 - DNA, 1761 bp, Saccharomyces cerevisiae
atgtcacgaagtaacagtatatacacagaagatattgagatgtatcctactcacaatgagcagcatctgacgagagaatacacaaaaccagatggtcaaacgaaaagtgaaaaactaaatttcgaaggcgcttatatcaacagtcacgggactctatccaagactaccacaagggaaatagaaggcgatttagactctgagacttcttctcactccagtgatgataaagttgatccaacccaacagataactgcagagacaaaagcgccatatactttactaagttacggtcagaagtggggaatggttgcaattctaacaatgtgtggcttttggtcttcattgggatcaccgatctattatcccgctttgaggcagttggaaaagcaatttaatgtggatgaaaatatggttaacgttactgtggttgtgtatctgttgtttcaaggtatatctcccacagttagcggtggtctggcggattgctttggacggagacctataattttagcaggtatgctgatatacgttattgcatccatcgggctagcatgtgctccatcatacggtgttattatcttcttgaggtgtattcagagtattggtatttcccccacaattgcaatcagttctggtgttgtcggggacttcactttgaagcatgaaagaggtacatttgttggcgccacctcagggtttgttttactgggtcaatgttttggtagtcttattggtgccgtcctgactgcaaggtgggattggagagctatcttttggtttttgaccattggttgtggaagttgttttctaattgcctttcttattttgccagaaacaaagcgaaccattgcaggtaacctttccattaagcctaaaagattcatcaacagagcgccgattttcctactgggcccagttagaaggagattcaagtacgataatcctgattatgagacattagatcccaccattccgaaactagatttgtcatccgccgggaagatccttgtattgccagaaattattctgtctttatttccatcagggctcttatttgctatgtggacgttaatgctttcctctatttcatccggtttatcagtggcgccatacaactatcatttggtcattattggtgtgtgttatctacccggtggtattggcggtttaatgggttccttcttcacaggtagaattattgacatgtatttcaagagaaagatcaagaaattcgagcaagacaaagctaacgggttgattccacaagacgcagagattaatatgttcaaagtccgtttagtttgtcttctgccccaaaatttcttggccgtcgtagcctatcttttatttggttggagtatagataagggctggaggatcgaatctattttaattacttcatttgtctgttcatactgtgctatgagtacattatcaacatcaactacgttattggtcgatttgtacccaacgaaatcatctacagcaagtagttgtttcaactttgttaggtgcagtttgagtaccatcttcatgggttgctttgccaaaatgaaagctgcgatgactgtaggtggtacttttacatttttatgtgcgctggtatttttcttcaacttcttaatgtttattccgatgaaatatggtatgaagtggagggaggatagattattgaaacaacaaagacagtcttggttaaacaccttggcagtcaaagccaaaaagggaacaaaaagagaccagaacgataatcataattaa

SEQ ID NO: 48 - DNA, 1761 bp, Saccharomyces cerevisiae
atgtcggatcattctcccatttctaataaggaaaatcatctgctgccatcagactcgtcaagaagctcatccagcgatatgcattcgacgggcaccacgggaaccacaggcgtcgaacctgtagatttcaccggtgaaggtgccaaatacacaactgctacggagggcaatggtggtgcagatttagcgattcaaagaacgacgactatgaattctgctgcagaatcagaggttaatatcacgagaagattaactaaaatccttactgggtctgttaacgagcctgaccgtgtagaggttgattataccaattgtgcgcccatgggtggtgacagaccttaccctccatcgttgccgagcagagacctgtacgaggttacttttgatggtcctaacgacccactacatccatttaactggcccatgaagaagaaagtgctgctatgtctggtcttatgtctggattctattgccattgctatgtgttcttccatttttgcctctgcagtgccgcaaatctgcgagatataccacgtcatcgaagttgtcgccattttgggtatcacgctttttgttcttgggtttgcggcctcaccggttatctatgctcctctttctgaattgtacggtagaaagggtgttctggttttatctgcgtttggatttgcccttttccaatttgctgtcgctactgctgagaacctgcaaactattttcatatgtagattctttggtggttttatcggggcagcacccatggccgtcgtccccgccgcgtttgccgacatgtttgatactaatgttagaggtaaagccattgcgctattttctctaggtgtttttgtaggccccattttatcgcctgtcatgggttcttatatcgcacaaagaactacctggagatggttagaatatgttgtcggttgtttcgcttccgcagttttcgttgccatcgtattgttctttgaagaaacacatcaccctaccattttggttaacaaggccaaacagatgagaaagcaaagtaataactggggtattcatgctgctcatgaagacgtggagctatccatcaaagacattgtccaaaaaactgtgacgaggcctatcattatgcttttcgtggaaccattgctactattcgtgactatttacaactcttttgtctacggtatcttgtatttgttactggaagcctacccacttgtctttgtggagggttatgggtttactgaaaacggtgagttgccatacatcgccttgattatcggtatgatggtgtgtgctgctttcatttggtatatggacaacgattatttgaaaagatgtagagccaaggggaaattagtgcccgaggccagattgtacgcaatggtcattgcaggtaccgttttccctattggtatcttatggttctgttggacgggctactatcctcacaagattcattggatggtccccacagtaggaggggccttcatcgggttcggtttaatgggtattttcttgccatgtttaaactatatcattgaatcgtatctattgttggcagcttctgccgtcgcagcaaacactttcatgaggtctgcatttggtgcatgcttcccattgtttgcaggatatatgttccgtggcatgggtatcggttgggctggtttgttattaggtctatttgccgctgcgatgattcccgtgcctttactattcttaaaatatggtgaatctatcagaaagaaatccaagtatgcttacgccgcttaa

SEQ ID NO: 49 - DNA, 2709 bp, Saccharomyces cerevisiae
atggagcaaatcaattcgaacagtagaaaaaagaagcaacaattggaagtattcaaatattttgcaagtgtccttacaaaagaggacaagcctattagtatcagtaatggtatgttagatatgccgacagtgaactccagtaaactcacagcaggaaatgggaaacctgacacggagaagcttacaggagaactaattttaacatacgacgatttcattgaactgatatctagctcaaagactatttattcgaagtttacggaccattcgttcaatttgaaccagatacccaagaacgttttcgggtgtattttcttcgctattgatgaacaaaacaagggatatctgacgcttaatgattggttttattttaataatttattagaatatgataattatcatctcattattctatatgagttctttaggaaatttgatgtagagaatttgaaggcaaaacaaaaaaaagagcttggtagttcgtcgtttaatttaaaggctgcagatgatcgaattaagtcaattaattatggtaacagatttctaagctttgatgatcttcttttgaatctgaaccaattcaaagatactatccgcctgttgcacgaatctattgatgataattttgttaaagataacaaattactacttgattggaatgactttcgatttctgaaattttacaaatgttatcatgaaaatgaagagtatttgagtttaaactctctggtcacgattttacaaaatgatcttaagaatgaaaaaatatttataggttttgataggttggcacagatggactcacaagggcatcgtttagccctaagcaaaaatcaactcacctatcttctaaggttattttactctcacagggtgtctgcagatatattttcctccttgaatctatcaaacaccgaattactaaaagcggacaataattccattccgtacaatgtattcaaggatatattttatttatttcaaaattttgacctactgaaccaaatatttcacaagtatgttactgaaaataatttgaatgagcaggatattagggaacaaatagttactaaaaatgactttatgacagttttaaacgcccagtataacaaagtaaacaatatcattgagttctctccttcccaaatcaacctactattttctatcgtcgcaaattcaaaggaaaacagaagattaagaaagagaaatcaagatcgagatgacgagctattaaatgatcaccattatgattcagatattgatttttttatccataatgagtatttgcatggagtaagcagatccagaaaaaatttagaaagttttaatgactattatcatgatctctcggatggatttgaccaagactctggtgttaaaaaagcttcaaaagcgagtactggcttgtttgaatctgtatttggaggtaaaaaagataaagcaacgatgcgttctgacttaacaattgaagatttcatgaaaattttgaacccaaattacctgaacgacttagttcaccaaatggaattgcaaaaaaatcaaaatgagtcattgtatattaattactacttttatccaattttcgattcgttgtacaatttctccttgggttctattgcgggttgtattggtgcaactgtagtatacccaatagactttataaaaacaaggatgcaagcccaaagatctttagcccaatacaaaaactcaattgattgtttgttgaagattatatcccgcgaaggaataaaaggtctctactctggcttagggccacaattaataggagttgctcctgaaaaggcgataaaattgactgtcaatgattttatgagaaacaggttgactgataaaaacggcaagctaagcctttttcctgaaattatttctggcgcttcagctggtgcatgtcaagttatatttactaatccgttagagattgtaaaaattaggctacaggtccaatccgactatgttggtgaaaacatacaacaagccaatgaaactgccactcaaatagtcaaaaaattaggactgaggggcttgtacaatggtgtagccgcatgtttaatgagagatgttccattctctgctatttattttcccacttatgcacatttaaaaaaagatctctttgattttgatccaaatgataaaacaaagaggaatcgattaaaaacatgggagcttttaactgccggtgccattgctggtatgccagctgccttcttgactactccttttgatgttataaaaacaaggctccagatagatcctcgaaaaggtgagacaaagtataacggtatatttcatgctatccgaactatcttaaaggaagagagctttagaagctttttcaaaggtggtggagcccgtgtcctaagaagttctccccaatttgggttcactctggccgcctatgaattattcaagggctttattccctcccccgataacaaattaaaaagcagagagggtaggaagagattttgtatcgatgacgacgcaggcaatgaagagacagtagttcatagtaacggtgaactcccacagcaaaagttttactctgatgatagaaaacatgccaattattactataaaagctgtcaaattgcgaaaacattcattgatttggacaataacttttctaggtttgactcttcagtttataaaaactttcaagagcacctaagaagcattaacgggtga

SEQ ID NO: 50 - DNA, 933 bp, Saccharomyces cerevisiae
atgacatctatagataatagacctttgccgttcatataccagttcacagccggtgccattgccggcgtctcggagctattggtgatgtatccattggacgtggtgaagacaagaatgcaattacaagtgacaaccaaaggtcatcccgctgttgttgcagcgaaagcagcagtagatcactacacgggcgtgatggattgtcttacaaaaattgtgaagaaggaaggattttcgcatctttacaagggtatcacatcgcctatattaatggaggctccgaaaagagcaattaagttctccggaaacgatacattccaaacgttttataaaaagattttccccacgcccaatggggagatgactcaaaaaatcgccatatacagtggtgcgtccgctggcgccgtggaagcctttgtcgtcgcgccttttgaactagtgaagattagattacaggatgtgaattcacagttcaagacacccattgaagttgtaaagaatagtgttgtgaaaggtggtgttttgtcacttttcaatgggttggaagccactatctggagacacgttctttggaatgccggttatttcggtataatattccaaattcggaagcttttgccggcggctaaaacaagcacggaaaagaccagaaatgatttgatcgcaggtgctattggtggcactgtcgggtgcttgttgaatacaccatttgacgtggtaaaatctaggatccaaagaagttccgggccgctgaggaagtacaactggtccctgccttcagtgctgttagtttaccgtgaggaagggtttaaagcattgtataagggatttgcgccaaaggtcatgagacttgcccccggtggtgggttattgttggtagttttcacgaacgtcatggattttttcagagaagtcaagtatggtaaaaaacaatga

SEQ ID NO: 51 - DNA, 924 bp, Saccharomyces cerevisiae
atgtcatcagactcaaacgcaaagccattgccttttatatatcagttcatatcaggtgccgtcgccggtatttctgagttaactgttatgtatccgcttgatgttgttaagacaagatttcaactggaggtgacgacgcctactgccgctgcagtaggaaagcaagtagagagatataatggtgtcatcgattgtttgaaaaaaattgtaaagaaggaagggtttagcagactttacagaggtattagttcaccaatgttgatggaagcaccaaagagagccaccaaatttgcatgtaacgatcaatatcaaaaaatcttcaaaaacctattcaacacgaatgaaactacgcagaagatctccattgcggctggtgcatctgctggtatgacagaagctgcagttattgttccatttgaattgatcaaaatcaggatgcaagacgtcaagtccagctatcttggaccaatggactgtttgaaaaaaacaatcaaaaacgaaggtattatggggctatacaagggtatcgaatctaccatgtggagaaacgctctttggaatggtggctacttcggtgttatctaccaagtgagaaattccatgcccgtagcaaagacaaagggacaaaagaccagaaatgaccttattgcaggtgcgatcggtggtacggtcgggaccatgcttaacactccctttgacgtggtgaaatccagaatccaaagtgtggacgcggtcagcagtgctgttaaaaaatacaactggtgcctaccttcgctattggtcatataccgtgaagaaggcttcagagcattgtacaaaggtttcgtccccaaagtatgtagactagcacccggtggttcattaatgttggtggtttttaccggtatgatgaactttttcagggatctgaagtacggacactga

SEQ ID NO: 52 - DNA, 879 bp, Saccharomyces cerevisiae
atggaggacagtaaaaagaaaggattaatagaaggcgctatactcgatataataaacggttccattgcaggcgcctgtggtaaggtgatcgagtttcctttcgatactgtgaaagtcaggttgcaaacacaagcatccaacgtgttcccaacaacatggtcttgtataaaatttacttaccaaaatgaaggaatagcacgagggttttttcaaggcattgcttcacctttagttggagcatgtctggagaacgcgacattatttgtgtcttataaccaatgttctaaatttttagaaaaacatacaaacgtttccccgttggggcaaatcctgatctctggtggagtagcgggttcatgtgctagtttagttttgacacccgtggagctggtgaagtgtaagttgcaggttgcgaacttacaagttgcatcagctaaaacgaaacatacaaaggtgttgcctacaataaaagcaattataactgagagaggattggcaggattgtggcaagggcaatcgggcacttttattcgagaaagcttcggtggtgttgcctggtttgcaacctacgaaatagttaagaagtcgttgaaagataggcactcccttgatgacccaaaaagagatgaaagtaagatatgggaactacttattagtggagggagcgctggattggcattcaacgccagtatttttcctgcggatactgtgaaatcagtaatgcaaactgaacatataagcctcaccaatgcggtgaagaagatatttggcaaatttggactaaagggtttttatcgaggactgggtataaccctttttagggcagtaccagcaaacgctgcagttttttacatctttgagactctttctgcactttaa

SEQ ID NO: 53 - DNA, 900 bp, Saccharomyces cerevisiae
atgtccagtaaagctaccaaaagtgacgtagatccattgcactcgtttctggcagggtccctagccggtgctgctgaagcatgtataacatatccttttgaatttgccaaaacaaggctgcagctgattgataaggcctccaaggcatcaagaaatcctctggtattgatatataaaactgcaaaaactcagggcattggttccatttatgtcggatgtcccgcatttattattggtaacaccgctaaggcgggtattagatttcttggctttgataccattaaagacttgctaagagatagggaaactggagaactaagtggtacaagaggggtgatagctgggttaggtgcgggactattagaaagtgttgccgcagtgactccttttgaagcaatcaaaactgctttgatcgatgataaacaatctgctacaccaaaataccataataatgggcgcggtgtagtacgaaactattcatcattagtccgtgataaaggattttctggtctttatcgtggtgttttgccagtttccatgagacaggccgcaaaccaagccgttagattgggttgttacaataagattaagaccttgatccaagattatacggattcgccaaaagacaaacctttatcatccgggttaaccttcttagtgggtgcatttagtggtattgtgacggtctattccaccatgccccttgatactgtgaaaacaagaatgcaaagtttggattccaccaaatactcctctacaatgaattgttttgcaaccattttcaaagaagaaggtttaaagacgttttggaaaggtgctacgcctagacttgggagattggtcttgagtggtggtattgttttcactatctatgaaaaggtcttagttatgctagcctga

SEQ ID NO: 54 - DNA, 975 bp, Saccharomyces cerevisiae
atgtcatctgacaactctaaacaagataaacaaattgaaaaaacagccgcccagaagatatcgaagtttggttcgtttgtggctggtgggctagcagcatgtatagctgttacagttactaatccgatcgaattgattaaaatcagaatgcagcttcaaggtgaaatgtcagcatcagctgcaaaagtttataaaaatccaatccaaggtatggcggtaattttcaaaaacgaaggtataaaaggtctgcaaaaagggttaaatgctgcttatatctatcaaattgggctaaatggttccagattagggttttatgagccaatcagatcatcattaaatcagcttttcttcccagatcaagagccacataaggtacagagcgtcggagttaacgtcttttctggtgccgcatctggtataattggtgcagtcattggctctccattattcttggtgaaaacaagacttcaatcatattccgagtttataaaaattggtgaacaaacgcactacaccggtgtttggaacgggttagtaaccatttttaaaaccgaaggtgttaagggtctattcagaggtattgatgcggcaattttaaggacaggtgctggttcctctgttcaactacctatctacaacacagcaaagaacattttggtcaaaaatgatctgatgaaagatggcccagcattacatttaactgctagtactatctctgggttaggtgttgccgtcgttatgaacccatgggatgtcattttgacaagaatctataatcaaaaaggtgacttgtacaagggacctatagattgtttggtcaaaactgttagaatcgaaggtgtaaccgctttgtataagggttttgcagctcaagtgttcagaatcgcacctcatacaatcatgtgtttgaccttcatggaacagacaatgaaactagtttattcgatagagtcgagagttttaggccataattaa

SEQ ID NO: 55 - DNA, 1530 bp, Saccharomyces cerevisiae
atgcgtaactatttagttaaatttttgtatattttttattctatgacttcacttatccattatttccatcgtcaaaaaaaggaaataaatactgttgctcgaacgaacagcaagataaagtggaaacgaaaagtaagcagcttcctcaatatgccgtcaaacgtacgttcgggagtcttaactttgctccatacagcatgtggagcaggcgtacttgcaatgccgtttgcattcaagccatttgggttaatgcctggtctgataacgctaacattttgcggaatatgttccttatgtgggctgctattacagactcgaatagcgaagtacgtacctaaatctgagaacgcctcgtttgctaaactcacccaactaatcaatccgtcaataagtgtagtgttcgattttgccattgctgttaaatgttttggcgttggtgtatcttacttaattattgttggtgacttagtgccacagatagtgcagtcaattttttatcgtaacgatgataacatgagtggttcgcaagagcatcacatgttcttagacaggcgtttgtatataactctgatcatagtgtttgttatctcccctttatgctttaaaagaagtttgaattctctacgatatgcttctatgattgccattgttagtgtcgcatatttatctggtttgattatttaccattttgtaaatcggcatcagctagagagagggcaagtatattttatggtacctcacggagattctcagtctcattctcccctgactacattgccaatttttgtgtttgcttacacttgtcaccacaatatgttcagtgtaattaatgagcaagtggataagagcttcaaggtaatcaggaggattccgatttttgccatcgtgttggcctattttttatacatcataattggtggtacaggttatatgacatttggtgagaatattgtaggaaatatcctcactttatacccgaattccatctccaccaccatcgggaggttagcaatgctgctattagttatgttagcatttccattgcaatgccatccttgcagatcatcggtaaaaaacataattatattcattgaaaatttcagaaaaggtaagttatacgataacagagctagctttattccattagacaactttaatagtgaagatccgcaggaggcgccaacccaacaaaacaacgaagagccaaatctgcgtagtgagtctttacggcatatcaatattatcaccctttgtatcttactgttctcatatctactggctatttcaattacgtctctagcaaaagtcctagcaatagttggtgccacgggatctacgtcgatttctttcattttgccaggcctttttggttataaattaattggctcagaatttacgggcacgaatgaaagagtaccgacaagcataaaaatattcaaatacttaagtttatctctattcatctgggggatagcagtaatggtagcttcactatcagcgattgtatttttgggcacatcatcacattga

SEQ ID NO: 56 - DNA, 1074 bp, Saccharomyces cerevisiae
atgacgcgagatagcccagattctaacgacagctataagcatataaacaagaatactacacaaaaaacctcgtttgatagaaattcattcgattatattgtacgatcgggattagctggaggtatatcaggttcatgtgcgaaaacactaatcgcacccttagatagaataaaaattttatttcaaacatcaaatccgcactacacaaagtacacaggctcactaataggattagtagaggcagccaagcatatatggatcaatgatggggtaagggggttttttcaaggccattcagcaacccttttaaggatttttccatatgctgctgtcaaatttgttgcttatgaacagattaggaataccttgattccctcaaaagaatttgagtcacattggagaaggttggtgagtggttcactggcaggattatgcagtgttttcataacatatccgttagatctcgtgagggttaggttagcatatgaaacagaacataagagagtaaagctaggaagaataatcaagaaaatatataaggaaccagcttcagccacgctaatcaaaaatgattatattcctaactggttttgtcattggtgtaatttttataggggttatgttccaactgtacttggcatgataccatatgcaggtgtttccttttttgctcacgatttacttcatgatgtgctgaagagtcctttctttgccccttattcagtattagaactttcagaagatgatgaattggaaagagtacagaaaaagcagagaaggcctttgcgtacgtgggctgaattgatctctggtggtctagctggtatggcctcccaaacggcagcatatccatttgaaattattaggagaaggctccaagtaagtgcactgtcaccaaaaactatgtatgatcataaatttcaatcgatatctgaaattgctcacataatatttaaagaacgtggagtacgtggattttttgttggtctaagcataggttatattaaagtaacacctatggttgcatgtagttttttcgtctatgaaagaatgaaatggaattttggcatttaa

SEQ ID NO: 57 - DNA, 924 bp, Saccharomyces cerevisiae
atgtctgaagaatttccatctcctcaactaatcgatgatttggaagaacatccacagcatgataatgctcgagtcgtgaaagatttgcttgcaggtacagcgggtggtattgcgcaagtgctagtgggccagccctttgatacgacaaaagttaggttacaaacatcgagcaccccaacaacagccatggaagtcgtcagaaagctgcttgccaatgaagggcctcgcgggttttacaaaggaactctgacgccattaattggtgttggtgcatgtgtttcattacaatttggtgttaatcaagctatgaagagattttttcatcatcgcaatgctgatatgtcatcgactttgtcattgccacagtattacgcatgtggtgtcacaggcggtatagtaaactcattcttggcgtccccaattgagcatgtcaggattcgcttgcaaacacagactggctcaggcaccaacgcagaattcaagggtcctttggaatgcatcaaaaaattaagacataacaaggccttgctacgtggtttaacacctacaatattgagagaaggtcatggatgtggcacatatttcttagtgtatgaagcgttgattgctaaccaaatgaacaaaagacgtggactagagagaaaggacattcctgcatggaaactttgtatttttggagcattgtctggcactgccttatggttgatggtatatccattagatgtcatcaagtctgtcatgcaaacggataatttacaaaagcctaaatttggtaattctatttccagtgtagccaagactttatatgccaatggagggataggcgcttttttcaaagggtttggtcctaccatgctaagagctgctcccgccaatggtgccacttttgctacttttgaattagcgatgaggttattgggttga

SEQ ID NO: 58 - DNA, 990 bp, Saccharomyces cerevisiae
atgagtgaagaatttcctacgccgcagcttttggatgaattggaagatcaacagaaagttaccacgccgaatgagaagagagagttaagttctaatcgtgtgttgaaggatatttttgcgggtaccatcggtggtattgcacaagttcttgtagggcaaccgtttgatacaacaaaagttaggcttcaaacagccaccacaagaacaacaacgttggaggtattgcgtaacttggtaaagaatgagggtgtgtttgcattctacaaaggtgcgttaacaccgttattgggtgttggtatatgtgtctcagtacaatttggtgtgaatgaggcgatgaaaagatttttccaaaattacaacgcttctaagaacccgaatatgagctcacaggacgtagatctttcacgttcaaatactctgccactatcccagtactacgtttgtgggttgacaggtggtgtagtcaattcattcttggcatcgcccattgaacaaataagaattcgtttgcagacgcaaacatctaatggtggagacagagaattcaaaggtccttgggactgtattaaaaaattgaaagctcaaggtggattgatgaggggtttatttcccacaatgataagagccggacatgggcttggtacatattttcttgtctacgaagcattggttgccagagaaattggtacgggactaacaagaaacgaaattcctccttggaaattatgcttatttggtgcattttccgggacaatgttgtggttgacagtatacccattggacgttgtgaaatccattatacaaaacgatgatttacgaaaacctaaatacaagaattccatttcttacgtagcaaagaccatttatgcaaaagaaggtatcagagcctttttcaaagggtttgggccaacaatggttaggtccgcgcccgttaatggtgcgacattcctgacgtttgaattagtcatgagatttctgggggaagagtag

SEQ ID NO: 59 - DNA, 855 bp, Saccharomyces cerevisiae
atgaatactttttttctttccttgctaagtggcgccgctgctggtacctctacggatttggtttttttccctatagacacaattaaaaccaggcttcaagctaagggtggattctttgctaatggaggatacaaaggcatatatcgtggtttgggaagcgctgttgtagcatcggcgccaggtgcttcacttttctttattagttatgattatatgaaagtaaaatcaaggccatatatcagcaaactttactcacagggatctgagcaattgattgatacgacaacgcacatgctttcctcttccattggtgaaatttgtgcttgtcttgttcgagttcccgcagaagtcgttaagcaaaggacgcaagttcactctaccaattcttcctggcagactttacagtcaattctacgaaatgacaataaggaaggtttaaggaaaaatctttatagagggtggtctaccaccattatgagagaaataccgtttacttgtatacagtttcctttatacgagtatctaaaaaagacttgggcaaaagccaatggccaaagtcaagtggagccatggaaaggggctatctgcggttctattgcgggtgggatcgcagcagctacaacgacaccattagatttcttgaaaaccagattaatgctcaacaaaacaaccgcctcacttggaagcgttattattaggatttacagagaggaaggtcctgctgtatttttcagtggagtggggccccggacaatgtggatcagtgcaggtggtgctatcttcctaggcatgtatgaaactgttcattcgttattatcgaaaagtttcccaacggctggagaaatgagagcgtaa

SEQ ID NO: 60 - DNA, 1809 bp, Saccharomyces cerevisiae
atgcctgagcaagaaccattgagtcccaatggccgtaagcgctctgaggttcactatatctcaatcccattgaacagaggttccgcattctcaccagatgattctgtatcacagtttcagtctgacgggttcatgacacgtaggcaatccatattggaccatcctgtgggctcatttaagggagttaattctttaagtcgatttgcgacttcgttgaggagagccaattcgtttcgtaatatcgagctaaatgcggataatgaaagatcctttttcaaagagagtaacgatgaaacctacgatccggatactttagcaccagctttggacggtagaagattatcagtaactttaaataatgctggtcgcccgcgcattactaatttggctaacaacgatagagttagtacagccagcatggctattcacgatgatgattatgggtccatccaaaattcaacaattggggattctgggtcaatattacgccctactgcctccttaacagaaatgatgagtggtggagcggggagaaggtttacaaataatgacatggattcaattgtagtgaagagagtggagggtgtagatggtaaggtagtaactcttcttgctggtcagtcgaccgctccacagaccatattcaactcaatcaatgtactgattggtattgggctcctggcgttacctcttggtttgaaatacgccggctgggttataggacttactatgcttgcaatcttcgccttagcgacattttgtactgctgaacttttgtctaggtgcctagatacagatccaactttgatatcttacgcggacttgggatatgcagcatttggtacaaaagggcgcgcactaatttctgctcttttcacacttgacctactgggtagtggggtgtccttggtgattctcttcggagattctttaaatgctctatttcctcaatactccaccacttttttcaaaatagtttcattttttatcgttacacccccggtttttataccattgagtgttctatctaatatctcgcttctgggaatcctttcaacaaccggaactgtgctagtcatttgctgctgcggactatacaagtcgtcttctccaggttcattagttaatccgatggaaacgagcatgtggccgatagatctaaagcatctctgtttatctataggtttattgagtgcctgctggggaggacatgcggtttttcccaacttaaagacagatatgaggcatccagataaatttaaagactgtttgaaaactacctataagataacatcggttacggacataggtactgcagttattggctttttgatgtttggaaatcttgttaaagatgaaattactaagaacgttttgctgacggagggatatccaaaattcgtttatggtctgatttcagcgcttatgactatcattcctatcgcaaagaccccattgaacgcaagacctatcgtttctgtattggacgttctgatgaatgtgcaacacatagatgaagcggccagcgccataaaaagaagagctgcgaaaggccttcaagtattcaataggatctttattaatgttgtcttcgttttgatagctattaatttccctgaatttgataagattatcgcatttctgggggccggtttgtgttttacaatttgcctaattttgccgtgttggttctatttaagattgtgcaagacaacaatcaaaccatgggagagagtggcttgtcacgtaaccatatgtattagtgtcgtgttgtccacattaggtgttggtgctgcaattatttcataa

SEQ ID NO: 61 - DNA, 1443 bp, Saccharomyces cerevisiae
atgtctgagttaggtgagtattctaaattagaaaacaaagagcttagaacggagtttgaattgacaaattttccttttccaggcacaactgataacgactccgatgacggaagccaagggcagaactctttgaatatcattactcctgacatggatgatactctggttaatgatgtacttcgagaaaacgataaaaagtctagtatgagaatggcttttatgaatctagcaaactctattcttggtgccggaataattactcagccgttcgcgatcaaaaatgctggtatattaggcgggctattatcatacgtagccctcggatttatagttgattggacgttaagacttattgtcattaacttgactcttgctggcaagagaacataccagggtacggtcgaacatgtaatgggtaaaaaagggaaattgctgattctatttacaaacgggttatttgcatttggtggatgtattggttattgcataattattggggatacgataccccacgtactcagagctatattcagccagaacgatggtaatgtacatttttggctcaggcgaaatgtcataattgtaatggtcactactttcatttcctttccgttatcaatgaagagaaacatagaggcactatcaaaggcatctttcttggccgttataagtatgattataattgtactgacagtggtaattagaggacctatgctgccctatgattggaaaggtcattctctgaagttatctgattttttcatgaaagctactatattcagaagtctctctgtcatttcctttgcgttggtttgtcatcataatactagttttattttcttttccatgaggaatagaagtgtggcaaaatttaccaggttaacgcatatcagtatcattatctcagtaatatgctgtgcactaatgggatattcgggatttgcagttttcaaagaaaaaacaaaaggcaatgttttaaacagtttcccaggaacagacactgctatcaacatagccagactctgtttcggatttaacatgctaaccacattccccatggaaatttttgttttgagagatgttgtcggtaacttgttacatgaatgcaaccttattaaaaattatgacgaacacactcaattatcaggtaaacagcacgtcgttataacttcttcactagtcttcatcaccatgggtatatcattaactacatgtaatttaggagcattatttgaactgattggggccactacggcatcgactatggcttacattttgccgccatacacaaatttgttgttaactagtaagaagaagagttggaaggaaaggcttcctttctatctttgtatatgctttggtttcatgattatgataatcagcagcacccaaactattattgatgcagttaatggttctgatggacagcactgccaaatatag

SEQ ID NO: 62 - DNA, 397 bp, Saccharomyces cerevisiae
atgaatggaaaagaggtttcaagtggctctggaagaacgcagagcaacaacaacaaaaaaaataacaacggaggcagtacaggaatctcgcatgcgtctggctcacctttaacggacggcaacggtggcaatagcaacggtaatagtagaagtagaagcagaagtagaaaatctagtggaactacaggtggtttgctaaaaaagccgccgctgcttgtgaacaatgaagcggtgcatgctagcgtacccgacgcgtcgcacacttcctgtaacaatggcacgcttgaagtgagcataaataaccctgagccacatgtggtagatgccgtggcacgccacttgataagaaacccgagtaacagcctacaattgcaaggcggagacattacaagagatc

SEQ ID NO: 63 - DNA, 2142 bp, Saccharomyces cerevisiae
atggtcactaacaatggagatggtgagcaccttgggatccgaagaaacggaaatttaaggcatccttccaataatatgaaaattcccagaagggctcaatcaacagttctcaattcaaacccattttatagtaggaagtattctatgtctaccttaacgccgagggatatatgtcgaagcgttgattctagagtatttgtggatatgtcttctcccaattttcagactctggaggatccccacagagatgagattataaacagtgtacggcttaactacttgaacagtagcaaaagaagttccgtctctcatggaaatgaagcaatccctagggttaatccgactaagaattcttcagcaagtaccatagctgcagcaaatgttgatagtgatgacgatgagactaacctgagtagcgctggaggcgacataacgcatgatatttacaagttggttaaagcagaggatcctaaacggctcagacgccctcggtccatggaaaatgtaacacctaaaattgagcaccatactaaattgtcatcagcaagtggtttaaatgtccccggtggcttcagaagggaatttattgtcaacaaaaaaaggcaagaacatcaattaaatgattccgctagctcagacttcacttcgcatgaaagcgattcgattaaccagtcatctccatcttctaaccaagatatcgataaggtcccctttttaacaagaaactttttggaatttctatacgtgtttggacattttgctggtgaatccttcgaggatgattttatccctgatagctcaaacatgatgatacgcggagaagatgaaaggagtgcattgctgtctcggcctgaccatatgaaagtattaccttcagccaaaggtacgacttcgacaaagaaggtttttttgatattgcttaaatctttcattggaactggcgttttatttttacctaatgcctttcataatggtggtttgtttttctcagtaagtatgctggccttttttggaatttattcatactggtgttactacatattggtgcaggccaaatcttcatgcggtgtatcctcctttggtgatattggtttaaaactgtatggaccttggatgagaataataattcttttctccctagtaataactcaagttggattctctggagcttatatgatatttactgcaaaaaatttacaagcttttcttgataacgtattccatgtgggcgtcctacctttatcttacctgatggtctttcaaacgatcatttttattccactttcgtttattagaaacatttcgaaattgtcactaccatctttactagcaaattttttcatcatggctggtttagtcattgtcattatttttacagccaaaaggttgttttttgacctgatggggaccccagcaatgggtgtcgtctatggcttaaatgcagaccgttggacgctgtttatcgggacggcaatatttgctttcgaaggaatcgggttaattattcctgttcaagactcaatgagaaatcctgaaaaatttcctttagtacttgctttggtgattctaacggcaaccatacttttcatttccatagctacattgggatatttggcatacggctcaaatgttcaaacggttatactgttgaacttacctcaaagtaacatttttgtaaacttaatccagctgttctattccatcgcaattatgttgtccacacctttgcagttgtttccagctattaaaattattgaaaataagttttttccaaagttcactaaaatatatgtcaagcacgatgatctaacaacaagagtcgaattacgtcctaattcaggaaagctgaactggaaaattaaatggctgaagaactttattcgttctataatcgtaatcattgttgtatcaattgcttactttgggtctgataatttagacaagttcgtttcagttataggatccctcgcctgtattcctttggtatatatatacccatcgatgctgcatttacggggcaatagccttccagagactaaaggggaattttggagattcaaaccaatgttagataccattttaattttcttcggtattgcaagcatgctttatacgtcttaccagagtatattcggtgtctag

SEQ ID NO: 64 - DNA, 1530 bp, Saccharomyces cerevisiae; identical to SEQ ID NO: 55

SEQ ID NO: 65 - DNA, 1347 bp, Saccharomyces cerevisiae
atggtagctagtattagatcaggtgtgctgacacttttacacacggcgtgcggtgctggtatcctggccatgccgtacgcattcaagccgtttggattaattcctggagtgataatgatagtgctgtgtggggcgtgcgctatgcaaagcttgttcatacaagctcgtgtagctaaatacgtaccacaggggagggcctcgttcagtgctctgacgcggttgattaacccaaatctaggtattgtgtttgacctagcgatcgctatcaagtgttttggtgtgggcgtctcttatatgattgtagttggggatctgatgccccaaataatgtctgtgtggaccagaaatgcttggctgttgaacaggaacgtgcaaatttcactgatcatgctttttttcgtggccccgctgtcttttctgaagaagttgaattcgttgaggtacgcttccatggtggccatctcttctgtagcgtacttgtgtgttttggtgttgttgcactatgtagcaccatcagatgagattcttcgcttgaaaggccggatctcctacctcctgccaccacaatcgcatgatttgaacgtgctaaacactcttccaatttttgtctttgcctacacatgtcaccacaatatgttttcaataatcaatgagcagaggtcaagccggttcgagcatgtgatgaagattccactgatagcaatatctttggctctcatcttatatattgcgatcggctgtgctggatacctgacattcggcgacaacatcattggaaacattatcatgctgtacccgcaagcggtctcgagcaccatcggcagaatagcgattgtgttgttggtgatgctggcgttcccactacagtgtcatcctgcaagagcttcaatccatcagattttgcaacacttcgccgaggaaaatgtaagtataagtgctacatcggcggatgaacccactgttgctaccgaaagttctccgttgattcgcgacagtagccttgacctcaatgaggtaattgaagaagaatctatttatcagcctaaggagactccattgagaggcaagagctttattgttataacgtgcagcattttagttgcatcatatcttgtcgccatttcggtttcctccttggcccgtgtactggccattgttggggccacaggctccacttctatttctttcattctgcccgggctctttggctacaagcttataggaactgagcacaagacagccgtgccattgacgacaaagattttcaaatacacaggtcttctcttgtttatctgggggctaataatcatgatcacctgcctgaccgcagctttgaagctaaactaa

SEQ ID NO: 66 - DNA, 1473 bp, Saccharomyces cerevisiae
atggaggctacatcaagtgctctttcgtctacggcgaatctcgttaagacaatagttggcgctggtacacttgccattccgtacagttttaaaagcgatggtgttctggtaggggttattcttacattattggcggcggtaacatccggtctgggtctctttgtgctatcgaaatgttccaagaccttaattaatccaagaaactcttctttcttcacattatgcatgctcacctatcccactttggccccaatttttgatttggcaatgatagttcaatgctttggtgtgggcttaagttacttagttcttattggtgatctctttccaggactgtttggtggtgaaagaaattattggataattgcatcagctgtaatcatcattcccctatgtttagtgaagaaactagatcaattgaagtattctagtattctaggtcttttcgcgctagcatacatatcaattctggtgttcagtcattttgtgtttgagctgggaaagggtgaattaacaaatatattaagaaatgacatatgctggtggaaaattcacgactttaaaggattattatcaacttttagcattataatttttgcttttacgggatcaatgaacctattccccatgataaatgaattaaaagacaacagcatggaaaatatcactttcgttatcaataattcgatatccttatcaacagcactatttttgatcgttggtttatcaggatatttaaccttcggtaatgaaaccttgggtaatttaatgttgaactacgatcctaactcaatttggatagtaattggcaaattctgtcttggctcaatgttaattctttccttcccgcttctctttcatccgctgcgcatagcagttaacaatgtcatcatctggattgagatcacttatggtggggcaaatcccgaagaggacccacaagtttcggaatacactcgtgcttccaacctaagaccaattagcatgactgtggaagatccagcccagcccagtgatgcactagacgcaacttcttataacgagcaagaatgtttactacctaacgggaactttgataatggttcaattgaaagtcaagagaacaataatgatgaaagagggactatggcggtcgccggggataacgagcatcatgcgccatttgttaagtctagattttactggattactgcattattactaataagcatgtataccttggcgttgtctgtccagtcatttgcactggttctttcatttgtaggggctacaggttcaacgtctatttcattcactttacctggattattaggttacaaattaataggcttggattctttggctattgggaagatgattccaccaaaagatagattttacaaaaggtgcagcttattgctagtcttctacggactatctgtgatgtttttgtcattgtatgtaactgtattcaaccgttcagatgaagcctaa

SEQ ID NO: 67 - DNA, 1689 bp, Saccharomyces cerevisiae
atgcaaacactagacgagacttcaaatctactccctccacctgaggaagctgaagcccctcccttggaacaaaaatttcatgaatataatttggccttacctaagtttcccattttgttttcgctatggttgggtagttttttgagttccttggatagcactattgtcgcaaatataatgaatagagttgctgaggaattctctgaatcaagtaaaaagcaatggattgcgacgagttttcttttgacaaatacggctttccaaccactatatgggaagctttctgatataacagggcggaagtcagcattattaaccgctcaatttttttttggccttgggtgcttattaacatgttttgccagaaacgtcacggaattctcaatagcaagagccatatgtggtattggtgcaggaggattgaatgctattagtagcattgctgttagtgacatatgtacagcaagagaaaggggcgtttaccagggatatgcgaatattgttttcgggtttggtcaattactaggtgctccgttgggtggtgtatttatagaaaccattggatggagggctctttttggtatccaagtacccgtgataatgttgtgctcggtattagcaatcaaaaacattaatattaagctattccatgttcctcctatgaaagaaagatataccttaaagaatctgtcacggatagatatatttggctcattaagcctggtggcgaccattagtggagttttatttttgtgctctagccagttgaacaagttgtatttagcattgtttaccattggtagctttattgtttttatcctggttgaacgttattacgcgactgagaaaattttaccattcgaactattgactcgctcattctgtttgagctcagcggtaacggttatatcttcatttgttgtatttggtgaaatctttaggtcaccaatctatttacaattgcttcaaaatattagtgtaacaaagactggcctctttttgattttcccctctatatcagttgcagtcggatcattggtaacaggatgggtattgcggaatacgaaaattaacctagcacactgtgcatatcaaatcatttttggtggtatgataatgcagctattgggtttgggattgggctatttcctactttcacacttgaatcctgactacaccatatatgatatgcttgagtctattacattcagatctaactcaatatggtggaaattgatatatgtgtttgcatcagtccttgtgtcctttggttacgcttgtctattagtggccacgttagtaagcatcgtattcaccgtcgaaaaatcacagcaaggaaccatgactggtgttttctatttgtggagatccattggtaacgttcttggtgcctctttaactttagtgtcctatgagaatagcctgtcgtccatgttatggaattatatgttcaaaaccaagcgtgatgacgaatatcacttcaccaaaaagcagtactactcccttatcaatgattcgagttacttgagagggcccaattttccaacggatatatttgttcgcattcttgatgtctacaaaaaggcattcctgatttcctatattccaaatatagccctggcagcagtgggaattgttttatcgttatatctggtgaaacatacttacaaacgtagttcaagttcttga

SEQ ID NO: 68 - DNA, 1425 bp, Saccharomyces cerevisiae
atgagtatttcaaattggatcaccactgcgtatttaattacatcaacatcttttcaacctctttatgggtcattttctgatgcacttggtcgaagaaactgccttttctttgctaatggggcttttaccattggatgtctagcctgtggtttctcgaaaaacatctacatgcttagttttatgagagcattgacaggcataggaggtggtggcttgatcacactttctacaatcgtaaattcagacgttattccaagttcgaaaagaggaatttttcaagcgtttcagaatttacttttgggatttggtgccatatgtggagcgtctttcggtggcacaatagcgtcgagcattggttggaggtggtgttttctcatccaagtacccatatctgtgattagttccatattaatgaattattatgtacctaatcagaaagaatataatcgtcaaaattctagcatattccaaaatcccggaaaaatactcagggacatagatgttatgggctcaattcttattataactggtctcacactacagcttctttacctgagcctggggtgttctacttctaaattatcatggaccagcccttctgtgctactgctattagttgggagtgtaataatcctcttactgttcatattgcacgaaaggaaaacaagtgctagagcgattattcctatggagctggtcaattcctcctacagtgtcgttgtactttcgataagtatacttgttggttttgccagctacgcgtatctttttactttaccattattctttcagattgtacttggagattccactgcaaaagcaggattacgtcttacgattccttccctatttactccggtaggcagtctcataacaggattttccatgagcaagtacaactgtctaagattattactctacattggtatttctttgatgtttttgggtaactttttattcctgtttattgaaaaaacttctccgaactggttgattggtctatttttgatacctgcaaatctaggacaaggtatcacttttcctacgaccttgtttactttcatatttatgttctctaagagtgaccaagctactgcgacatcaactttatatttattccgtagtattggatctgtatggggtgttgcaatttcagctggcgtcattcaattatctttcgcaggtttattgcgtagtaatttgaaaggtctactggatgaaaacaagataaagaaacttattgttcagcttagtgcaaactcctcatatattggatctttacatggcgaagttaaaaacacagtcataaagagttttgatgaggcaacaaagagggctcatctaatgtctacattactctcttcattggccctgatactctgcatccttaaagacaatctggcgaaacctaaaacaagaagataa

SEQ ID NO: 69 - DNA, 1377 bp, Saccharomyces cerevisiae
atgaatatgctcattgtcggtagagttgttgctagtgttgggggaagcggacttcaaacgctttgctttgttattggttgtacgatggttggtgaaaggtcacgtccattggtgatttccatcctaagttgtgcatttgctgtagctgctatcgttggtcctataatcggaggtgcctttacaacccatgttacctggaggtggtgcttctatatcaatcttcctatcggtggtcttgccattattatgtttttactcacatataaggccgagaataagggtatacttcaacaaattaaagatgctataggaacaatctcgagctttacttttagtaagttcagacaccaagttaattttaaaagacttatgaatggcataatcttcaagtttgacttctttggttttgccctctgctctgcagggctggtccttttcctactggggctaacctttggtggtaataaatatagttggaactctggccaagtcatcgcatatttggttttgggtgtcttactttttattttttcattggtgtacgatttcttcttattcgataaattcaacccggaacctgataatatatcctacaggcctctccttctaagaagattggtagcaaaaccagccataataataataaacatggtaacatttctattatgtaccggttacaatgggcaaatgatatactctgtccagtttttccaacttatatttgcgtcgagtgcatggaaagccggtcttcacttgataccaatcgttattaccaacgttattgcggccattgcaagtggtgtgattaccaaaaagctcggtttagttaaaccactcttaatatttggaggcgttcttggggtaattggagcagggcttatgacacttatgacaaatacgtccacgaagtcaactcaaattggtgttttgctattaccggggttttcccttggatttgctctacaagcatcgctcatgagtgcacagcttcaaattaccaaagatcgtccagaagctgctatggactttattgaagtaacagctttcaatacattcatgaagtcattaggtacaactcttggtggtgtgctttcaaccactgttttttccgcctcctttcacaacaaagtatcacgagctcatctagagccttacgaaggaaaaacggttgatgacatgattttgtatcgtcttcaaaactacgacggttctcattcgactattggaaacattttaagcgactccattaagaacgtattttggatggatctagggttttatgccttaggatttttgttttgtagtttttcatccaataagaaattaatcataccaaaaaaggacgagacaccagaagataatttagaagacaagtag

SEQ ID NO: 70 - DNA, 2307 bp, Saccharomyces cerevisiae
atggggaagaaggatagacagcgcaagaaactgcgtgagtttgctaaattgaaaaacaggcagcgaaacttgagaaagagcgtgcaaacattgaagaatgaggttcaacgagaggctaaagtcccaagaacttcgaatcaaattgctttaggaaacgacaaaatcgaagagattaacgaaaatagtccattattatcagctcctagtaaacaagaggaggtatcaattccgaaagcggttgatattgataccattgatgcacagcctcttcacgaaggcccaaaaattgatgactcgccccaagatgaggtcaatagcattaaaggaaaacctgcggacaaggctaatgaagacgatcttaagccgccttcacaacatgaagcatgtggaaattcagctttgcaaagctctattacagattttagtgatagatcagtatcaccattgcaaagtattaccagctgcaatactccgatgagtgagcacgagctaccagtatcttcctcaaattcgtttgaaagagctgatgatatgcctgtagtgcaggcagataaccagacgtcaagtagtaaatctttgcacattgttgcaccatctcctgaagtaccagtcagcggagatgaaatcacttcatatggatatggctctataccccagagcatcggggatgtagagaacggattgaatcctccttatgtcgaaaatacatcatctgatgaacttgtacatgatctgacgagaagacggatattttcatcctgtatgtgtacttatttattctttattgcaatggacagttctataatcctagtaattgcgtccaaaattgcttcggagtttcatgagttatggagattatccttagtcatctcagcatacctattgagtaatgctattgggcaactggtatttttgaagctatctttaatatccagtgtaaaattgttgttgtgtattgctcaattcagttttatccttggtggctatttatcttggagttctgcccatttttggacgtttatctttgcccgttgtgtcacaggatttgggggcggttccttaatagcgctcaaaagtactattatgaatcggttttctcaaaagaacgacagtcggtactcattgagtgcctctatgataacatttgctatgggtgtggtaattgggccctttatgatgaacttgtttgattcttctcatggtagcgggtggagaaatgccttcttaataccagttcctttttgccttgtgaatgcctcgattatgctggcagatatgtattctgttaagagcactttatatggacgcccaacgcctacattatggaaaagattcaagaatactctattaagtcctgatttatacgaaatattgacacttacgctattcctactttgtttcgttcaagtgacctcattggatttaacagggttaaagaataatacgatgattcaagcgctactattttctgtaattatcgtttgtggcattttatttttcttgatagagacaagcgatacttacatgaactctgtaatttcaatgtccttacaaggtgacaagcgtttaatatggacaatgataggaatttcattttgctttgcagcattaatgtgcatcatcccattcggtacaacgtacttcatcattgttttaaatttaagcactttacaacttgcagagagattgtccccattctttttctccattgtactgggttactttagtgtttcttatttttggaagtcgaaaggacagaattttttgctaaaatttgttttaagcggagccaccctgttactatatgtggcacttatgggggtaagtttgaatttaccagtatggaagcaatatatatgtttgtctctgccatttttgggctcctctatgatattgaccttgctgtcaaatctttatcatgagtaccatgaacaaagaaagtcacctatcagtggttctatcgtatattgtttcggtgccgtgggggggacggttggtatttccttgggtggttatgtcttccacaaaacattaataaaacttatgcatgagaaggtgatgccatttagcaagcaaggttatcttaaaaaggaccttttgaaaattatcaagcacgctacggaatcttcagattgggtacacgaatcagccccaaagtttgtttttcaaactttgattgagtgttatttacaagcatgtcgaaacgtattcaaactctctacccttttttttacgattactgtcgtagcaatattcattttcaacagaatccattgtcgtagtcaaaattgtttgtcactatcttga

SEQ ID NO: 71 - DNA, 1749 bp, Saccharomyces cerevisiae
atggaggaaactaagtactcttcgcagcaggagatagaaggagcatgtggttcagacgcttcattgaatgctagaggtagcaatgattctccaatgggactttccttgtacctctgcctggcttcgttaactcttgtactattcataactgcactggatattttgatagtgggaactattattgacgtggtcgcagaacagttcggaaactactccaaaacaggttggctcgttacaggctacagtttaccaaatgctattctgagtctcatttggggaagattcgcatctatcataggtttccagcatagtctcattttagcaatacttatttttgaagccggatccctaattgctgcccttgcctcttcaatgaatatgctcattttcggtagagttgttgctggtgttgggggaagcggactccaaacgctttgctttgttattggttgtacgatggttggtgaaaggtcacgtccattggtgatttccatcctaagttgtgcatttgctgtagctgctatcgttggtcctataatcggaggtgcctttacaacccatgttacctggaggtggtgcttctatatcaatcttcctatcggtggtcttgccattattatgtttttactcacctataaggccgagaataagggtatacttcaacaaattaaagatgctataggaacaatctcgagctttacttttagtaagttcagacaccaagttaattttaaaagacttatgaatggcataatcttcaagtttgacttctttggttttgccctctgctctgcagggctggtccttttcctactggggctaacctttggtggtaataaatatagttggaactctggccaagtcatcacatatttggttttgggtgtcttactttttattttttcattggtgtacgatttcttcctattcgataaattcaacccggaacctgataatatatcctacaggcctctccttctaagaagattggtagcaaaaccagccataataatagtaaacatggtaacatttctattatgtaccggttacaatgggcaaatgatatactctgtccagtttttccaacttatatttgcgtcgagtgcatggaaagccggtcttcacttgataccaatcgttattaccaacgttattgcggccattgcaagtggtgtgattaccaaaaagctcggtttagttaaaccactcttaatatttggaggcgttcttggggtaattggagcagggcttatgacacttatgacaaatacgtccacgaagtcaactcaaattggtgttttgctattaccggggttttcccttggatttgctctacaagcatcgctcatgagtgcacagcttcaaattaccaaagatcgtccagaagctgctatggactttattgaagtaacagctttcaatacattcatgaagtcattaggtacaactcttggtggtgtgctttcaaccactgttttttccgcctcctttcacaataaagtatcacgagctcatctagagccttacgaaggaaaaacggttgatgacatgattttgtatcgtcttcaaaactacgacggttctcattcgactattggaaacattttaagcgactccattaagaacgtattttggatggatctagggttttatgccttaggatttttgttttgtagtttttcatccaataagaaattaatcataccaaaaaaggacgatacaccagaagataatttagaagacaagtag

SEQ ID NO: 72 - DNA, 1587 bp, Saccharomyces cerevisiae
atgagctatggaactataaatgatatgaatgaatcggtaacgaactatcgaataaaaaaagcccaaaacaatatcaagggatggtacgcttactcattttctagcgaaccatttgtcgtttctgcggtttcaacgtatattcccttactactgcagcaatttgcgagtataaatggtgtaaaagttcacgatcactccataccctgcctgtcagaaacgggtagtgattcagataagtgtgttcttggtttgttcaacaatcggatcttcgtagatacttcaagttttgcattatatgtcttttcccttagcgttttattccaaactataatagtcatttccgtttcagggatagtagatctctgggggagcgttaaattcaaaggcagaattctggtttggtttggtattgtgggcgcattgtcgactgttgcgatttcaaaattgaatgatacccagatttattctctggctgggctttatatagtggccaatggttgttttggcgttatcaatgttgttgggaattctcttctgcccatttttgtcaaggattctttgaaatgtcaaagtcaaggagcttatgaacctgataaggtagactcgttaactactgttattagcggtagaggtgcatctttaggttattcaagtgccctcattgttcagattgtatctatgttcttagtcgcatctaaaaagggcagtaagcaggatgttcaagtggctgttcttttcgttgggatttggtggtttgtgtggcaactgcccatgatctggttgattgacgatgtgacaataccgataagagttgacgattctacattagcatccgcccgcagtccgtatcccggtgagcaagacgccttgggtcaactaaactggaagaattacctttcatatggttgggtttcgcttttcgaatcgtttaaacatgccagactattgaaagatgtgatgatttttcttattgcgtggtttattattagtgattccattacaactataaattctacagcggttttgttctccaaggcagaactgcacatgagtaccctcaatttaatcatgataagtgttttgaccgttgtaaatgcaatgctgggtgcctttatgattccacaatttcttgccacaaagtttcggtggacttctagtcaaactttgatgtacattatcatttgggcaagtttcataccattttatggtattcttggatttttcttcaatgcgttcggtttaaagcataagtttgaaatgttcttattggccatttggtatggattatcactaggtggcctgtccgcggtttcaagatcagttttcagtttgattgtacctccaggaaaagaatccacgttttttagtatgttcagtatcacagataaggggtcgtccatcctgggacccttccttgttggactgcttaccgataaaacgcataatattcgctattcgttttatttcttctttttgcttttgatgctatcattgcctgtgctaaactgtttggatgtcaagagaggtagaagagaggctgaagaactcagtcaagttttacctgaaagtgaaagaaggttggattag

SEQ ID NO: 73 - DNA, 1773 bp, Saccharomyces cerevisiae; identical to SEQ ID NO: 11

SEQ ID NO: 74 - DNA, 1836 bp, Saccharomyces cerevisiae; identical to SEQ ID NO: 13

SEQ ID NO: 75 - DNA, 891 bp, Saccharomyces cerevisiae
atgaagctgatcccaattattttgaatgctaagaatctcagtgggatggctggatccatatcaatatgctgttggattgttgtgtttgtaccacagatttatgaaaacttccgaagacagtctgcggagggattatcactgcttttcattgtgttgtggctattaggtgatatatttaacgtcatgggagctatgatgcaaaatttactcccaaccatgataattttagctgcttactatacattggcagatttaattttgttaatacagtgcatgtggtatgacaaggagaagaagagcattttacaagaagtcaagaaaaatgttgatcctgtgcatttgcctccagcaaaccccataaatgagactgtcttacaagacgtttttaatgaatatgagccacttttgccaaggatagaagaagaagatagccaatcgtatagctcgcttgagcttggcagaacaatagtcgtaaaggaaagagagaattttttcaatgacttcttaattgtttcaggtgtacttattgccggaattttgtcatggtatatatcttactgttccggcctagataacggtattcctaaaaaaaaacctgcgttcgaacagattaatttacctgcacaaattttagggtatttaagtgcgatactgtacttgggctctaggatccctcagattgttcttaacttcaaaagaaaatcatgcgaaggagtctcattcctattctttttatttgcatgcttagggaacacttctttcataatctcagtgctctcagcatcttggcttatcggtagcgctggtacgctgttgatggacttcacagtttttattcaatttttcctttacgccaaacctaaatacgagaaaatactaatagataattaa

SEQ ID NO: 76 - DNA, 2178 bp, Saccharomyces cerevisiae
atgcctcaatctactccaagtcaagaagtacagcgtgtaccatgggataataaacctgctttgaagcagataacactccgagcaaccatagcaggtatcgctatagggtctctggtgctaacatcaaattttcaatttggcctgcaaaccggttgggtttccatgatgtccctgccatcggcattgttagcttgtgctttctttaaaaatatctggccattaatatttccgaacgacaggcctttcagtgacgttgaaaatgtatacgtacaaagtatggcagtagctgtcggaacaggcccattagcctttgggtttgtcggcgtcatacctgccatcgagaagttccttactaacgacgaaagtggtggattaagggaacaaggacagtccttcacttttagagaattgttaatatggtccacagccctagcattcttcggtattttttttgcagttcctctaagaaagcaagtaattgttagagagaaacttcccttccccagtggtagcgccacggccactttaatttcagtgctaaatggaactgagattttacaagaggtttctaagtcagagttattggaaatgaggcagaggagattgaatgaatgccctgaagtgctacaacccaacagagatccagaggaggcggattatttaatgaactcttctcatagcgaacttggtgattatacggcaactagccaagatggaagttctatcctttctactggctctgagaactacagagcgaatattattattttattgaaaacttttgttgtttcttcgctttacaccatggtgtcatattttgtaccggtaatacggtctattccagtcttcggaaaatacctctcgaacaattatctctggaattttcagccgtcgcctgcgtatataggccaagggataataatgggtcttccaacagtatcgtatatgcttatcgggtgcttcttaggctggggtgtgttagcaccattggcgagatacaaaagatgggtaccaccagatgctgatgtccacgactgggaggagggagtgcaaggatggattctttggtcgtcgctttcaataatggttgctgacagtgtagtcgcttttattgttgtgacagtgaagtccattgtgaaatttattcttatagatgacaaagctgctttactgaacaacataatcgatgatacatttcaatctatgttactggaggaggaacgcgccattaatagcagcagaagaaatacatatgttgatggaaggcaggacaccgtaagattagtgagtagagataacgaaatagaagtagattcgaagcatttggttcgctataccaccgttatcagtggatgtctagtctcctcgataatatgcattgtttccataatatatttgtttgggatacaagtaattcccctatatgctattatcactgctttgatacttgcgttgtttctatctattctcggtattcgagcacttggagagaccgatctgaatcctgtgagcggcattggtaagatctctcaattgatttttgcctttatcataccaagggatagacctggatcagtgttaatgaacgtggtatcgggaggtattgcagaagcctctgcccaacaggcgggcgatttaatgcaggatttgaaaacggggcacctcctcggcgcctccccaagagctcagttctgtgcccaattgataggggcctgttggtcaattattttgtctagcttcatgtatttgtgctacaataaagtttattcaattccgagtgagcaattcaggataccgacagcagtagtgtggatagattgtgcaagactagtaactggtaaagggctccctgataaggccttggagtgctccatgattctcggagtcatatttgccgttttatcattaatcagaaacacttatagagattacggatacgggtggatattatatattccgtctggtgtagcagtcggtgttggtatatttaattctcccagttttacaattgcaagattcatcggcgggtgggcttcgcatttttggttgaagaatcataggggtgacttaaatgcgaaaacaaaaatgattgtattcagttcggggttggtcttaggtgaaggtatctttagcgtaataaacatgctcttcatctgcttaaatgtccctcactattag

SEQ ID NO: 77 - DNA, 2208 bp, Saccharomyces cerevisiae; identical to SEQ ID NO: 42

SEQ ID NO: 78 - DNA, 1755 bp, Torulaspora microellipsoides
atgtcaaagctcatccctatcgctagtcctgccctatcgatgatgacatcgagggcttatgacgaggtaaaaaatgaaaatgtagaaaaaggagaacaagggagcgtcgacgagaaaggagaatatgttgacgtcttgggccgtgagatcatctcaagtgaaaccgagaagcatggcaaccttccgctgcaggcttatgtccactacgctgggatccagcgtgaattcgagagagaaagagatgaagatggcctgtatgctgttcagagagaacagatgtatacagaccctcacagcaatgtctcaccatcgaagcttgattcacagagaatgctgcgcatagctaaggcatattccgtgttctttttaatcactaccgatattctgggcccatctaatgctccatatgctgttgcccaaatgggatgggtaccaggagttatcctttatgtcattttcggtgtcgctgctgcgtttggcggttggttgttgaacttctgcttttgcaaagtcgactctaacaactatccaattcgtacattttctgacctggctgcgcgtgttgttgcgccttggttccggtatccgttcgggcttctacagtttattcaaatgatactaaattgtggattactacttttaagcaccgctcaatctgtgtcacagatgctagttgtaaacagaggcggagatcacttctgctttaccgttgacattttagtgtggggtctcctatgtatgatcatgggccagattcgttctctcggcagatttgcacatattgcaaactctgccgtgtggatgaacatcgcaatctgtattatcacaatggtcggtgttgctctgggaggtccttactacggtatttttgaacaatatgggcaaggcgccccttacttccaacctagtagttacatcccattgccaattaaacaatacgccatcgtgcctggtaatattagtgataaaattgcaggtatgaacaatatggtttttgcttggggtggtgccacgattttctgcgaggttatggcagaaatgaggcgtccaatggacttttggaaaggtatgctctgtgcgcaatctctaattttggtcgtttatcttttctacggacttttcgtgtatgcttacaatggacaatttagttatgtgactgcaaacatggccattggctccataggattgcagaatgccggtaatgttctcaccatcataacaggtatcattgctatggtactgtacgggaatattggtattaaagttatctaccaaggttttctggtaacagattttaacttccccagccttacctcgcgcaagggaaccttcgcgtgggcaggatttgtggttgtctactgggccatcgcttatattcttggaacagctatcccatctattagcgctcttgttgcgattgtaggtgctttctgtatcctgaatttctcatacactttcccatttctttttggattctgcctgttatgccgccaagatgcggcattggccgacaacttcgatgctaagactctaactgtggagaaagctgactcatatcgcagctggtctaggtggaagcgtgctttagggtatggaggtacttaccgcattttgattaaagtttcgctctttttacttttcctagcctcgctcgcaacttgtggcctatgttcctactcagcaatttcgggagctatcgcagtctatcaaaccaatcctgcacaaccattcacctgcacttctcctgtggcctga

SEQ ID NO: 79 - DNA, 1752 bp, Torulaspora microellipsoides
atgtcaaaacttgtccctatcgctagtcctaacctatcgatgatgacatcgagggcctacgatgaggcgaagaaagaaaaaggatctcaagggaccattgatcatgagaaaggagaatatgttgacatatccggccgtgagatcatttccagtgagagcgagaagcatggacgccaactaccactgcaggcttatgttcactacgctgagatccagcgtgaattcgagagagaaagagatgaagatggcctgtatgctgttcagagagaacagatgtatacagaccctcacagcaatgtctcaccatcgaagcttgattcacagagaatgctgcgcatagctaaggcatattccgtgttctttttaatcactaccgatattctgggcccatctaatgctccatatgctgttgcccaaatgggatgggtaccaggagttatcctttatgtacttttcggtgtcgctgctgcgtttggcggttggttgttgaacttttgcttttgcaaagtcgactctaacaattatccaattcgtacattttctgacctggctgcgcgtgttgtagcgccttggttccggtatccattcggtcttctacaatttattcaaatgatactgaactgtggattgattcttctgagcactgcccaatctgtgtcacagatgttggttgtaaacagaggcggagatgatttctgctttacagttgacattttagtttggggtctcctatgtatgatccttggccagattcgttctctcggcagatttgcacatattgcaaactctgccgtgtggatgaacatcgcaatctgtattatcacaatggtaggtgttgctgtggggggtccttactacggtatttttgaacaatatgggcaaggcgccccttacttccaacctagtagttacatcccattgccaattaaacaatacgccatcgtgcctggtaatattagtgataaaattgcaggtatgaacaatatggtttttgcttggggtggtgccacgattttctgcgaggttatggcagaaatgaggcgtccaatggacttttggaaaggtatgctctgtgcgcaatctctaattttggtcgtttatcttttctacggacttttcgtgtatgcttacaatggacaatttagttatgtgactgcaaacatggccattggctccataggattgcagaatgctggcaatgtgctttccattatatctggtataattgctatggtgctttacggtaatattggtattaaagttgtttaccagggttttctggtaacagattttaacttccccagccttacctcgcgcaagggaacattcgcatggggaggatttgttattctgtactgggctgtcgcttatattcttggtacagccattccatctatcagtgcattggttgggatcgtcggtgctttctgtatcctgaatttctcgtacacattcccatttctttttggattctgcctgttatgccgccaagatgcggcattggccgacaacttcgatgctaagactctaactgtggagaaagctgactcatatcgcgagtggtctaggtggaagcgtgctttagggtatggaggcatttaccgcacttcgattaaagtttcgctctttttgcttttcctagcctcgctcgcaacttgtggcctatgttcctactcggcaatttcgggagctatcgcagtctatcagaccaaccctgcgcaaccattcacctgcacttctcctgtggcctaa

SEQ ID NO: 80 - DNA, 2718 bp, Candida albicans
atggatgaaaaaaatccaacaacagaattaagtgtacccaacatagaagcagttggaagtcatttacaagtccaagatcatgagattaatttacaagcgatcatatctaatcctctttccattggtgaagttgctactacattaactgaatcccaaaaatggtttgttttaaaaagattacattttgatgctttagtgtcattagatgaattaccacctcaagctagttttatatttgaaaaaattgaacaaatgaccactgaagaggcggttgaaatattagaaaaaaacattgaagagcacgagaccgatgttaatattccagaaaatgatttagttctttggaaagagttagttgaaaattcacataagttcaccaaagttcaattacaagaaaaattgggtagtaactcatcgtcatcagtggaaggtgagaagacagctgacgtcgaaaaaggtcacgaaattgttgattgggatttgcaagttcgtttagaagcagtattagttgcttattggtctccatatcctgaggttagagcagttactttcccatatgatgatccaactattcctgctgaaacttttagagtttatttaattgcaatcatctggaccgcaattggtgctgttatcaaccaattttttgttgaaagacaacctgctattacccttgccatgtcagttgtgcaagtgtttctttacccatcagggttactctgtgaatggattttaccaaaatggaaatttaaaatttggaaattgagtattgatttaaatccaggtccatatacatacaaagagcaaatgttggccactatcttttgtggtgttactggtggtggaacttcttatgtttccagtaatattcttatgcaaaaatccgaaatcttttacgacaataaatgggttgactttggatatcaagtattattaatcttatctaccaatttccttggtattggtcttgctggaataatgagaaaatttgccgtttacccaactaaagccgtatggccatccattttaccaggtttagcattgaataaaactttattaactccagctaaaaaagaagtaattaatggatggaaaatatctggttataattttttctttattgcatttgttgcctcatttctttatttctgggttccagattatttattccaagctttatcaacttttaattggatgacctggatcaaacctgataaccaaaaccttgcagtggttactggttcagttggtgggttaggattaaatccaattactactttcgattggaattatttcagttctatgcttcaaccacttcaagttccattcttttatccagttaataatattattggtatggctattgcattcttctgtatcatcggtgtttggtattctaattataaatggacaggatatttaccaatcaacgataatggtctttatacaaatactggagaaccttattctgtgagactggttgttgatgctaatagtttatttgatcaagcaaaatatgctgaaatgggtccaccattctataccgctgccaacttggttgtatatggtgctttctttgccatttacccattccactttgtttacgaacttggtatgaactacgatcaaatgtgggatgcttttaagtccttctggagagtaattaaggactataaaaaatcgacctacgacggctttgatgatccacatagtactatgatgagagcctaccctgaagttccagaatgggcttatttaattattgttgtcatttctttggtattggccattttgtgtgtcaaagtttatccagctgagacaccagtgtggggtattttcttcgcattaggtattaactttgtgttcttaattccattaactaccatctacgccagaactggatttgcatttggattaaatgttttggttgagttaattgttggttacgccattccaggtaatggattagccttagcattcataaaggctttaggttataacattgatggtcaagcacaaaactttgttaatgatttgaaacaaggtcattatgctaaactcccaccaagagctgtttatcgtgttcaattattatctattttcatatcatctttcattcaattgggtatattgaatttccaaattaatggaggtattaaagattattgtgaacctggcaatactcaaaaattcacttgtccaagcagtagaaccttttattcggcatcggtgttgtggggggttattggtccaaaaagagttttcaatggtttatatccaattttgagatggtgctttttaattggattcttgattgcattcccatgtattgccatcaagaaatggggaccaagaaaatatgttaaatatttcgaaccttcaattatcattggtggattcttaaactatgctccatataatttgtcatattatatccctggtctttatgtatcatttacatttatgtcatacattaaaagaaaatatgaagcatggtggcagaaatatacttatgttctttcaactggtttgaatgctggtattgccttttcatcaatcattattttctttgctgtgatgtatcatgaaaaagatattaactggtggggtaatactgttatgtattcaggtgttgactatgctatgacaggttggttgaatgccacagttgatgcaccagatggttattttggaccaagagttggtcacttcccttag

SEQ ID NO: 81 - DNA, 1101 bp, Candida albicans
atgaattatgaccaaatgtgggatgcctgcacatcattttggcgggtaataaaagatttcaggaagtcgacatatgatggttttgatgatccacacagtactatgatgagagcatatcctgaagttccagaatgggcttatttgatcattgttgtcatttcattagttttggccattttgtgtgttaaattatatcctgcccagacaccagtgtggggtattttctttgcattaggtattaactttgtgttcttaattcctttaaccactatttatgccagaactggatttgcatttggattaaatgttttggttgaattgattgtgggttacgctatcccaggtaacgggttagccttagcattcataaaggctttaggttacaacattgatgcacaagcacaaaatttcgtgaacgatttaaaacaaggtcattatgctaaactcccaccaagagctgtttatcgtgttcaattattatccatttttgtatcatctttcattcaattgggcattttaaatttccaaattaatggcatcaaagattattgcaagccagggaatactcaaaagtttacatgccctggcggtagaacattcttctcagcatcggtattatggggagttattggccccaaaaaagttttcaatggattatatccagtattagcatggtgtttcttgattggatttttattggctttcccttgtattgccattaagaagtatgcacctaggaaatatgttaaatactttgaaccttctattgttattggtggattcttgaagtatgcaccatataatttgtcgtactatattcctggtgtttatgtgtcgtatgcatttatgtcatacattaaaagaaaatacgaagcttggtggcagaaatatacttatgttctttcaactggtttgaatgctggtattgccttttcatcaatcattattttctttgctgtgatgtatcatgaaaaagatattaactggtggggtaatactgttatgtattcaggtgttgactatgctatgacaggttggttgaatgccactgttgatgcaccagatggatattttggaccaagacgtggtaatttcccttga

SEQ ID NO: 82 - DNA, 2766 bp, Candida albicans
atgtctacagagaaaccaattcctgctcttcctgttactagtatcaccagtcatgttgacgtggctgctcatgaagtgaaccttcaggcaataacatcaaaccctctttctattggcgaagttggtactacattgacaaatggtcaaaaggatttcatccttaaaagattacattatgattcgttggtttcttttgataaattgccacctcaagcaacatttatatttgagaaaattgaacatatttccattgaagaagctttagctatattggaaaaggctgttgttgaacatgaaaacgatgttaatattttagataacgatgaagagttgtggacaaagttgatcaactataagcaagggaaaatcccttcagatactgacttttctgaaaaagcacatccatctaatttcactgcaaaagacaaattgtcggcattcattcatgagaaaagggtatcagaagaaacctcatcattagacaacagtgccagtgagaatcttaacgaaccttattataagattgtcgattgggaattgcaagtcaaattagaagcagtgttgattgcttattggtcaccatatccccaagttagaggtgtgactgacccttatgatgatccaacaatccctgttgaaactgttagagtttatattgtcgctattatttggactgctattggtgctgttattaaccaatttttttctgaaagacaacctagtattggacttggaatgtcggttgttcaagtgttcctttatccaactggtttaatatgtgaatggattttacccaaatggaaatttaaagtttggaaatacactattgatttaaaccctggtccatatacttttaaggaacagatgcttgctactattttctgtggtgtttcttctggtacttcgtatgtatcatctaacattttgatgcaaaaatcagaattattttatgataacaaatgggttgatttcggttatcaagtattgttaacattgtcaacaaactttcttgggtttgggctttctggaataatgagacagtttgctgtttatccagaaaaggcaatttggccatcgattttacctaatgtcagattaaataaaactttaatgtcgcctgaagtgaaagcaagaatcaatgggtggagtatttctggttataatttctttttcatcactgctggtatttcatttttatatttttggattcctgattatcttttccaagcgctttctcaattcaattggatgacatggattaaacccgacaattataatcttgccgttgtgacaggttcctttggtggtcttggattgaacccaatcccaagttttgatatgaatgttattggtactggtggattcattgctccattttataatacattggagagttatattgggatggtacttgcacttttttgcatattaggtgtattttactcgaattacaaatggacgggatttcttccaatcaattcaaatcgtctttttacaaatgaggggaaaccatatcatgttactgcggttgtgaattctaactccttgtttgatgaagaaaaatacaaggaggtgggaccaccattctattctgctgggaacttggttctatatggggcattttttgccatttatccgtttcattttgtttacgaaattgcaatgaactataagcaaatgtgggaagcacttcaatccttatacaagggtattagaaatttcaagagatctacttatgaaggttttgatgatcctcatagtgttatgatgagagcatatcctgaagttcctgaatgggcatatcttatcattcttgttatttcattggtattggctatattatgtgtcaaattatatcctgctgaaacaccagtttgggggattttctttgccttggcaatcaactttgtgtttttgattccattaacaactgtgcaatcaagaacgatgtttggatttggtcttaatgtgttagttgaattgattgttgggtatgctattccaggtaatggattggctttagcatttataaaagccttgggctataatattgatggacaagcacagaatttcattaatgatttgaaacaaggtcattacgctaaacttccaccaagagcaatgtacagatgtcaattattgtctgtatttattacttcattcattcaattgggtattcttaattaccaaattactgggattaaagattattgtgttcctggtaataaacaaaaatttacatgtcctggaactacgacattctataatgcttcagttttatggggggttattggacccaagaaagttttcaatggattatatccaattttagcttggtgtttcttgatcgggttcttgttggctttcccatgtattgctttcaagaaatgggctcctagaaaatactccaaatattttgaaccttcgattattattggtggatttttaggttatgctccttataatttgtcgtacaatactgggggtctttatgttggttatgcatttatgcattatgtcaaaagaaagtatgaagcttggtggcagaagtatgattatctcttagctacagggattgatgctggtattgccttttcatcaatcattattttctttgctgtgatgtatcatgaaaaagatatttcctggtggggtaacaatgttccatttgaaggatgggacgcttcaatgaccaatggatatttgaatgctactttacaggcacctgatggttattttggtccaagagttggacatttcccatga

SEQ ID NO: 83 - DNA, 2838 bp, Candida albicans
atgacgaaaaaaggacacgaatacattcaattatcaacattttcagaacacgaaaatgaacatgaacctgaatcaagttcaactacatcatcacctccaccaccaggtatacgtcaatatgaaaaacaacatgaatggaatttcacagatttacaattacaatttgtccttttacgattaggtgtaattagtgatgaagtttatcataatcagaatttttcactcctggaccctgatattcatatttccaaagaagtagaatatatgattaataaaattgatcaattatctatatcagaagcaattgaaattattcgtgatgcattagcggatcataacggggatgttaatttcttaattgaagattatcaattattagaaagattaattagtcaaatccccaacaatattgaatctcaagaaaataaccaaaacgtcgagacaaatctcgatgaactacctgaaatgaaatatccaatgcaatcaacatttaaaaacaagacttacttaactatcattgattggtcattacaaattcgattagaagcagcattaattcattatcattcaccatatccggaaatacgagccattacagatccatttgatgatccaaatactcctgtggaaacatttcgagcttatttcattgcattgttttggacatttattggatcgttaattaacagttttttctatcatagaatgcctggtatatcattaggtactcatactatacaaattttgttattacctagtgggaaactttgggaaaaattaatcccattaaataaaactattactattaataatacaaaaatcaatttaaatcctggaccatggaattttaaagaaatgatgttgagtacaataatttatctgtgttccgcttcaactccatatctgatcaataatatatttgtgatgaaattagatcgattttatggattaaaatgggttaattggattttccaaattttattcaccgtatctactcaattacttggtttcagttttgccatgattatgaaaaaagtttgtgtttatcccagtaaggcaatttggccaacaatcttaccaacaatagctttaaatagagcattaatgaatcaagataatgcttcgaacaatagcattgttcatggttggaaaatatctccttattcatttttcttggtgactttcactcttagtttcatatataattggatccctagttattttttcaaagcattatcattatttaattggccaacttggtttaatcctaacctgattcatttagttaatatcacagggtcgaatgttggattgggattcaatccaatcccatcatttgattggaatgttattggtggttcaagtatggtgattccattttatacatttgtgaatcgttatttaggaacattcttgggatttattataattttaattgtttattatacgaataataattggacagcttatttaccaattaattctaatcgattatttaacaacaaggctcaattatataatgttcatgatatccttaatgatgataataaactttttgataatgaaaaatatcaacaaattggtccaccgtatttttctgcagcaaatttggtgatttatggtgcttatttttgtctttatccatttgctatattatatcatgggttaaccgaatggaattctatgaaaacaagttttattaatgtttggacttcaatagttgatgcctttaaactggagtcggagatgggcgtaagcgttgaatcaaatgatgataataaccttctgttgcatcgacaatatggtagatatgctaatgatccacattgtaaaatgatggctcattatcctgatgtacccgattggtggtttataaccattttggtggtaagtaccctgtttgctatagctgcagtatggttttacccggttgaaaccccaatatgggggatttttttcactattgccattaatttcatttttttaattcccttaacatcaattgcatccgtcacggggttttcatttggattaaatgttcttgttgaattaattgtcgggtatgctatacctaattctggaattgcattaattacattaaaagcctatggatataatattgatagtcaagcaagcaattatattactgatcaaaaattggctcattatgcgaaaatcccaccacgagcaatttttaaaggtcaattattatccactttattaaatattataatttcattaagtgttgctaattggcaattaaataatgtggaaaatatttgtgatcctcatcaaaaggataattttaaatgtcctggagctaatacatatttttattcaagtattcaatatggagaaattggtccagcaaaagtttttggaggattatatccaattttaaaatggtgtttccttttgggggtattattagttttcccctgtgtttggttgaaaagaaatggtccaacaaaaatattccaacgttattttcaaccaacaattataattggtgggatgttagattttgctccttataatttactgtattttactggtggcttatatatatcttatattttcatgttttatattaaaaaaaattatttactttggtgggaaaaatataattatattttaactagtgctttatcagctggtgttgcttttagtgctttaataatttttttcaccgttcaatatcatcctcatccattacattggtgggggaattcaattggtcaacaaggtattgaaggtggtgaaatttcaccaatttggaaaaatatcgatactgctcctgatggttatattggtttaagaaaaggtcatttcccatag

SEQ ID NO: 84 - DNA, 2244 bp, Candida albicans
atgtccaaagaggctgaatttgttaaaacaatttccaaggaaggtgatccacaggtggatgttcttgaaagagacgctgagtctaattctgaaaatgctttagaacctgatgttgaagagctaccaaaggtggtcagagagattgttccattggaagatgatcctaccattccggtgcttactttccgctactttatactatcaataattttcatcatacctggggcatttattgatacgatgaattctttccgtacaacgtcagcagcatattcaattttttttgttcaaatcgcatcacattggtgtggcaaatggctagctagaattcttcctaaaaagcaagttggttttggaagattgtcgttcaatttaaacccggggccctggtctatcaaggaaacggctttgattacaatcaccgcaaatagtggtgcaacggggagcatgggtaccaatcctttggcgttggcagaacttttctatggtgaaactgtcaaccctgctgttgccattttcttcatgtggatgattgtgtttattggttactcatttgctggtattgccagaaatttcttattgtatgaccctcaattcacatggccacaagctttgatgcaaacaacattatttcaaacccaaagtaaaagtgacaaagatgccaagcaagcatcaaagcaaatgaaagtgtttttctttgtcttgattggtttatgtatatggcagtttttcccggaatatatattccccatgacttcttcgttggcttttctttgttgggttgcgccagaaaactatacagccaatttcattggatctggtcttggtggaatggggtttcttaatctttcccttgattggtcaaatatcacctcgagtattatgttgtatccgtactgggtgcaagtagtacaattcgctgcgtttgttcttggggcatggatattgatcccagctgccaaatggggggatctttcaagttatccttacgggttaatgtcaaacagtttgtttttaggtaacggtaccaagtacccaactaccgagttgctcacgccaaatttaagattgaacgaaacccgatacgaagaacttgggccagtgcatcttggtgcccaacgtgcttggaatatgtttttcgattatgctgcctatgttagtggattcatgtgggttgttgcttttggttataaaagcttgtcagggtcgctcaaaagattggtgaagtcaagaaaacaaaaggggtccataaatttgcaatacactgataggttgaataaacttcaagcagcctatgaagaagttccattgtattggtacgctattcttttcttatgtgcatttgtcactcttttagtgatatttgcaacgaactcgttattcatgccgtggtggtgtcttcttgttggagttgcctttggtgctgtgattgttactcctttagtttggttgtatgctctatccaacttccagttgcccattggtaccttcaatgaattattatatggttatatgattcagaacaaaacgtcaagacatccagctggagctatggtgtatggtgcagttggtggggatttgttttacagagcccagtatattcttaatgatcaaaagattgcccattacatgcacatttctcaaagagcagtatttttctcgcagatatttggagaattaattggtgtacccatcaactatgccgccttaaggtgggtgatcctgtccaaaagagatttcttggatggcacaaaagtcgacaagcttcaccaatggactggccagaccattgtcagttacaacactaatgctgtgcagtatgtgattttgggaccagatagattattcaaaaactatccagtattgccatatggattcttgcttggtgctggtgctccactagtattatatcttcttcaccgattgtttcccaaatcgaaattgaagttccatttgtggaacaccactgtattcttttctactatgagtaccttctatggtaacctttcaacgggatatttttccagattcattggagggaccataacaatgttttgggcattcagatacaagcacagtttatggaaaaagtataattatttgttggcagctgctttggacactggccttaatttgagtatcttacttattttcttgttcttctcggctggtaaaacagtcaatttccccgaatggtggggcaacaatggcaagagtgtggagagatgttttgccatgagttga

SEQ ID NO: 85 - DNA, 2157 bp, Candida albicans
atgacaatagagacgatatcaaataatgaaggaatacggcagagatcagccagtgaaagcactcacacacatacttatctagatcaattagacatcccgcaaataacgttgaggtctactatagtcggattactaataggttcattggtccttatatcgaattttcaatttggtttacaaaccggatgggtttcaatgatgtcgttaccagctgccttattagcattttctattttcaagttattaccaatatccattgctaagaatttcaccgatgttgaaaatgtatttgtccagagtatagctgttgcagtaggaacaggacccctatgttatggattcattggcataatccctgcaatggaaaagtttatgactagtgaagaaagtggtttgggtcgacctttgacttttgggttgggccagttaatgatttggtcattgggtctcggattattcggggtattttttgccataccgttgcggaaacaagttattgtaaaggaaaaattacctttcccatctggcagtgcaaccgcaactttaatttcagtgttgcatggaagtgacatttatcaagataaagaggagatcagtgaaaagttggatatcgaagaagaagaagggagagaaacaggtagtattgcaactgaactggagagtttaacccaacaatcgtcaaaatcccaactcataactactaccaatattcaagatgattatgattcaaatatgagatcattaataatcacatttataatatcagccacatacaccatactttcattcttcctccctattttgaaaaagattcctatttttggcaatcatttatcggtcaattatttatggaacttccaaccatctccggcatatataggtcaaggtatcattatggggttgccaacagtttcctatatgttgtttggtgctatcttgggttggggtatattagctccattggcaaagcatatggagtgggcacctggaagaattgacgattggataaatgggggacaaggttggatcttatggattagcttaacggtaatgataagtgactccttggtgtcgtttgttgtggtgagcatcaaatcaattaataatgcattagataatttcagacaaagaagagatctagatcaatttctagaattgcaacaaagtcaacaaagtgaatacttattacaagatcaagaggaaactcgatcactgacttcatccaacgaaaatcctgaaaatagtacttacgatgggaagagaactcaagaggattgcaaatatacaatggaagtaccagaaagacatttagtttcaactaaaacaacggtgatcggaattgctgtatccacattgctttgcattatttctttgaaactagtgtttgggaacatagttcctatatatgcatcattagcagcaattatattggcaatgtttttctccatattgggagtcagagcattaggtgagactgatttaaacccagtgagtggaattggaaaattatcacaattgatttttgcattaataataccaagcaaccatccagccaagattttgattaatttggtcgctggtggagtagctgaagcaggggctcaacaagcaggtgatcttatgcaagatttgaaaaccggacatttaattggagcatcgccaaaagcccaatttattgctcagatattggggactctttattctgttggattaagctcaatcatgtataaagtgtacaacagtgtgtacaagataccaagcgatatgtttagaattccaactgcagtggtttggattgattgttcaaggctagtgactggtcaaggattacctcctcatattcgtgaatttgcgttggttttaggagtcatttttggtattatatcgttattaaagaatactgtgccgcccacttcactgtatcataaatatttggtttacttgccaagtggagtagccgttggtgtaggtatttacaacaccccaaatttcactttggccaggtttattggtgggttgatttgttacaattggcagaatataggtcctaatggtaagattggtatgattatattcagtagtggattggtgttgggcgagggactttttagtggattcactatgcttttaactagtttgggtgttaagcattggtaa

SEQ ID NO: 86 - protein, 633 aa, Saccharomyces cerevisiae
MSSSKSLYELKDLKNSSTEIHATGQDNEIEYFETGSNDRPSSQPHLGYEQHNTSAVRRFFDSFKRADQGPQDEVEATQMNDLTSAISPSSRQAQELEKNESSDNIGANTGHKSDSLKKTIQPRHVLMIALGTGIGTGLLVGNGTALVHAGPAGLLIGYAIMGSILYCIIQACGEMALVYSNLTGGYNAYPSFLVDDGFGFAVAWVYCLQWLCVCPLELVTASMTIKYWTTSVNPDVFVIIFYVLVITINIFGARGYAEAEFFFNCCKILMMTGFFILGIIIDVGGAGNDGFIGGKYWHDPGAFNGKHAIDRFKGVAATLVTAAFAFGGSEFIAITTAEQSNPRKAIPGAAKQMIYRILFLFLATIILLGFLVPYNSDQLLGSTGGGTKASPYVIAVASHGVRVVPHFINAVILLSVLSMANSSFYSSARLFLTLSEQGYAPKVFSYIDRAGRPLIAMGVSALFAVIAFCAASPKEEQVFTWLLAISGLSQLFTWTAICLSHLRFRRAMKVQGRSLGELGFKSQTGVWGSAYACIMMILILIAQFWVAIAPIGEGKLDAQAFFENYLAMPILIALYVGYKVWHKDWKLFIRADKIDLDSHRQIFDEELIKQEDEEYRERLRNGPYWKRVVAFWC

SEQ ID NO: 87 - protein, 609 aa, Saccharomyces cerevisiae
MLSSEDFGSSGKKETSPDSISIRSFSAGNNFQSSSSEKTYSKQKSGSDKLIHRFADSFKRAEGSTTRTKQINENTSDLEDGVESITSDSKLKKSMKSRHVVMMSLGTGIGTGLLVANAKGLHYGGPAALIIGYILVSFVTYFMIQAAGEMAVTYPTLPANFNAYSSIFISKSFGFATVWLYCFQWLTVLPLELITASMTIQFWNDKINPDIYILIFYVFLVFIHFFGVKAYGETEFIFNCCKILMIAGFIILSIVINCGGAGNDGYIGATYWHNPGAFAGDTSIGRFKNVCYILVTAYFSFGGMELFALSVQEQSNPRKSTPVAAKRSIYRIVVIYLLTMILIGFNVPYNDDQLMGAGGSATHASPYVLAASIHGVKIVPHIINAVILISVVSVANSSLYAGPRLICSLAQQGYAPKFLDYVDREGRPLRALIVCCVFGVIAFVAASSKEEIVFTWLAAIAGLSELFTWTSIMLSHLRFRQAMKVQGRSLDELGYKATTGIWGSIYGVFFNILVFVAQFWVALAPLGNGGKCDAESFFQNYLAFPIWLAFYFGYMVYNRDFTLLNPLDKIDLDFHRRIYDPELMRQEDEENKEKLRNMSLMRKAYHFWC

SEQ ID NO: 88 - protein, 604 aa, Saccharomyces cerevisiae
MSDPIVTSSKMEKSAEFEVTDSALYNNFNTSTTASLTPEIKEHSEESRNGLVHRFVDSFRRAESQRLEEDNDLEDGTKSMKSNNHLKKSMKSRHVVMMSLGTGIGTGLLVANAKGLSLAGPGSLVIGYVMVSFVTYFMVQAAGEMGVTYPTLPGNFNAYNSIFISKSFGFATTWLFCIQWLTVLPLELITSSMTVKYWNDTINADVFIVIFYVFLLFIHFFGVKAYGETEFIFNSCKILMVAGFIILSVVINCGGAGVDGYIGGKYWRDPGSFAEGSGATRFKGICYILVSAYFSFGGIELFVLSINEQSNPRKSTPVAAKRSVYRILIIYLLTMILIGFNVPHNNDQLMGSGGSATHASPYVLAASIHKVRVIPHIINAVILISVISVANSALYAAPRLMCSLAQQGYAPKFLNYIDREGRPLRALVVCSLVGVVGFVACSPQEEQAFTWLAAIAGLSELFTWSGIMLSHIRFRKAMKVQGRSLDEVGYKANTGIWGSYYGVFFNMLVFMAQFWVALSPIGNGGKCDAQAFFESYLAAPLWIFMYVGYMVYKRDFTFLNPLDKIDLDFHRRVYDPEIMRQEDEENKERLKNSSIFVRVYKFWC

SEQ ID NO: 89 - protein, 663 aa, Saccharomyces cerevisiae
MTLGNRRHGRNNEGSSNMNMNRNDLDDVSHYEMKEIQPKEKQIGSIEPENEVEYFEKTVEKTIENMEYEGEHHASYLRRFIDSFRRAEGSHANSPDSSNSNGTTPISTKDSSSQLDNELNRKSSYITVDGIKQSPQEQEQKQENLKKSIKPRHTVMMSLGTGIGTGLLVGNSKVLNNAGPGGLIIGYAIMGSCVYCIIQACGELAVIYSDLIGGFNTYPLFLVDPALGFSVAWLFCLQWLCVCPLELVTASMTIKYWTTSVNPDVFVVIFYVLIVVINVFGAKGYAEADFFFNCCKILMIVGFFILAIIIDCGGAGTDGYIGSKYWRDPGAFRGDTPIQRFKGVVATFVTAAFAFGMSEQLAMTASEQSNPRKAIPSAAKKMIYRILFVFLASLTLVGFLVPYTSDQLLGAAGSATKASPYVIAVSSHGVRVVPHFINAVILLSVLSVANGAFYTSSRILMSLAKQGNAPKCFDYIDREGRPAAAMLVSALFGVIAFCASSKKEEDVFTWLLAISGLSQLFTWITICLSHIRFRRAMKVQGRSLGEVGYKSQVGVWGSAYAVLMMVLALIAQFWVAIAPIGGGGKLSAQSFFENYLAMPIWIALYIFYKVWKKDWSLFIPADKVDLVSHRNIFDEELLKQEDEEYKERLRNGPYWKRVLDFWC

SEQ ID NO: 90 - protein, 619 aa, Saccharomyces cerevisiae
MDDSVSFIAKEASPAQYSHSLHERTHSEKQKRDFTITEKQDEVSGQTAEPRRTDSKSILQRKCKEFFDSFKRQLPPDRNSELESQEKNNLTKSIKSRHLVMISLGTGIGTGLLVGNGQVLGTAGPAGLVLGYGIASIMLYCIIQAAGELGLCYAGLTGNYTRYPSILVDPSLGFAVSVVYTIQWLTVLPLQLVTAAMTVKYWTSVNADIFVAVVFVFVIIINLFGSRGYAEAEFIFNSCKILMVIGFVILAIIINCGGAGDRRYIGAEYWHNPGPFAHGFKGVCTVFCYAAFSYGGIEVLLLSAAEQENPTKSIPNACKKVVYRILLIYMLTTILVCFLVPYNSDELLGSSDSSGSHASPFVIAVASHGVKVVPHFINAVILISVISVANSSLYSGPRLLLSLAEQGVLPKCLAYVDRNGRPLLCFFVSLVFGCIGFVATSDAEEQVFTWLLAISSLSQLFIWMSMSLSHIRFRDAMAKQGRSMNEVGYKAQTGYWGSWLAVLIAIFFLVCQFWVAIAPVNEHGKLNVKVFFQNYLAMPIVLFAYFGHKIYFKSWSFWIPAEKIDLDSHRNIFVSPSLTEIDKVDDNDDLKEYENSESSENPNSSRSRKFFKRMTNFWC

SEQ ID NO: 91 - protein, 592 aa, Saccharomyces cerevisiae
MTEDFISSVKRSNEELKERKSNFGFVEYKSKQLTSSSSHNSNSSHHDDDNQHGKRNIFQRCVDSFKSPLDGSFDTSNLKRTLKPRHLIMIAIGGSIGTGLFVGSGKAIAEGGPLGVVIGWAIAGSQIIGTIHGLGEITVRFPVVGAFANYGTRFLDPSISFVVSTIYVLQWFFVLPLEIIAAAMTVQYWNSSIDPVIWVAIFYAVIVSINLFGVRGFGEAEFAFSTIKAITVCGFIILCVVLICGGGPDHEFIGAKYWHDPGCLANGFPGVLSVLVVASYSLGGIEMTCLASGETDPKGLPSAIKQVFWRILFFFLISLTLVGFLVPYTNQNLLGGSSVDNSPFVIAIKLHHIKALPSIVNAVILISVLSVGNSCIFASSRTLCSMAHQGLIPWWFGYIDRAGRPLVGIMANSLFGLLAFLVKSGSMSEVFNWLMAIAGLATCIVWLSINLSHIRFRLAMKAQGKSLDELEFVSAVGIWGSAYSALINCLILIAQFYCSLWPIGGWTSGKERAKIFFQNYLCALIMLFIFIVHKIYYKCQTGKWWGVKALKDIDLETDRKDIDIEIVKQEIAEKKMYLDSRPWYVRQFHFWC

SEQ ID NO: 92 - protein, 602 aa, Saccharomyces cerevisiae
MSNTSSYEKNNPDNLKHNGITIDSEFLTQEPITIPSNGSAVSIDETGSGSKWQDFKDSFKRVKPIEVDPNLSEAEKVAIITAQTPLKHHLKNRHLQMIAIGGAIGTGLLVGSGTALRTGGPASLLIGWGSTGTMIYAMVMALGELAVIFPISGGFTTYATRFIDESFGYANNFNYMLQWLVVLPLEIVSASITVNFWGTDPKYRDGFVALFWLAIVIINMFGVKGYGEAEFVFSFIKVITVVGFIILGIILNCGGGPTGGYIGGKYWHDPGAFAGDTPGAKFKGVCSVFVTAAFSFAGSELVGLAASESVEPRKSVPKAAKQVFWRITLFYILSLLMIGLLVPYNDKSLIGASSVDAAASPFVIAIKTHGIKGLPSVVNVVILIAVLSVGNSAIYACSRTMVALAEQRFLPEIFSYVDRKGRPLVGIAVTSAFGLIAFVAASKKEGEVFNWLLALSGLSSLFTWGGICICHIRFRKALAAQGRGLDELSFKSPTGVWGSYWGLFMVIIMFIAQFYVAVFPVGDSPSAEGFFEAYLSFPLVMVMYIGHKIYKRNWKLFIPAEKMDIDTGRREVDLDLLKQEIAEEKAIMATKPRWYRIWNFWC

SEQ ID NO: 93 - protein, 603 aa, Saccharomyces cerevisiae
MPRNPLKKEYWADVVDGFKPATSPAFENEKESTTFVTELTSKTDSAFPLSSKDSPGINQTTNDITSSDRFRRNEDTEQEDINNTNLSKDLSVRHLLTLAVGGAIGTGLYVNTGAALSTGGPASLVIDWVIISTCLFTVINSLGELSAAFPVVGGFNVYSMRFIEPSFAFAVNLNYLAQWLVLLPLELVAASITIKYWNDKINSDAWVAIFYATIALANMLDVKSFGETEFVLSMIKILSIIGFTILGIVLSCGGGPHGGYIGGKYWHDPGAFVGHSSGTQFKGLCSVFVTAAFSYSGIEMTAVSAAESKNPRETIPKAAKRTFWLITASYVTILTLIGCLVPSNDPRLLNGSSSVDAASSPLVIAIENGGIKGLPSLMNAIILIAVVSVANSAVYACSRCMVAMAHIGNLPKFLNRVDKRGRPMNAILLTLFFGLLSFVAASDKQAEVFTWLSALSGLSTIFCWMAINLSHIRFRQAMKVQERSLDELPFISQTGVKGSWYGFIVLFLVLIASFWTSLFPLGGSGASAESFFEGYLSFPILIVCYVGHKLYTRNWTLMVKLEDMDLDTGRKQVDLTLRREEMRIERETLAKRSFVTRFLHFWC

SEQ ID NO: 94 - protein, 583 aa, Saccharomyces cerevisiae
MDEFESTKLSKVQFSTSVLSTPSNEGNNLIHRFKNSFKRNDSPAIQEGLLYSELSEEEKIQWDLANQPYKKVLDQRHLTMIAIGGTLGTGLFIGLGESLASGPASLLIGFLLVGASMLCVVQCGAELSCQYPVSGSYALHASRFIDPSVGFSIGINYLLMWLISYPSELVGCSLTISYWAPSVNPAAWVAIAFVLSMLLNLFGARGFAESEFYMSIFKIVALFIFIIIGIVLIAGGGPDSTGYIGTKYWHDPGSFAVPVFKNLCNTFVSAAYSFSGTEMVVLTSTEARSVSSVSRAAKGTFWRIIIFYIVTVIIIGCLVPYNDPRLISGSSSEDITASPFVIALSNTGAMGTRVSHFMNAVILIAVFSVCNSCVYASSRLIQGLATAGQLPKICAYMDRNGRPLVGMAICGAFGLLGFLVVSKNQGTVFTWLFALCSISFFTTWFCICFCQVRFRMAMKAQGRSKDDIIYRSTLGIYGGIFGCILNVLLVIGEIYVSAAPVGSPSSAANFFEYCMSIPIMIAVYIGHRIYRRDWRHWYIKRMDIDLDSGHSLEDFEATKLERDEDKKYVSSKPLYYRIYRFFC

SEQ ID NO: 95 - protein, 587 aa, Saccharomyces cerevisiae
MDILKRGNESDKFTKIETESTTIPNDSDRSGSLIRRMKDSFKQSNLHVIPEDLENSEQTEQEKIQWKLASQPYQKVLSQRHLTMIAIGGTLGTGLFIGLGYSLASGPAALLIGFLLVGTSMFCVVQSAAELSCQFPVSGSYATHVSRFIDESVGFTVATNYALAWLISFPSELIGCALTISYWNQTVNPAVWVAIFYVFIMVLNLFGVRGFAETEFALSIIKVIAIFIFIIIGIVLIAGGGPNSTGYIGAKYWHDPGAFAKPVFKNLCNTFVSAAFSFGGSELVLLTSTESKNISAISRAAKGTFWRIAIFYITTVVIIGCLVPYNDPRLLSGSNSEDVSASPFVIALSNTGSMGAKVSNFMNVVILVAVVSVCNSCVYASSRLIQALGASGQLPSVCSYMDRKGRPLVGIGISGAFGLLGFLVASKKEDEVFTWLFALCSISSFFTWFCICMSQIRFRMALKAQGRSNDEIAYKSILGVYGGILGCVLNALLIAGEIYVSAAPVGSPSSAEAFFEYCLSIPIMIVVYFAHRFYRRDWKHFYIKRSEIDLDTGCSVENLELFKAQKEAEEQLIASKPFYYKIYRFWC

SEQ ID NO: 96 - protein, 590 aa, Saccharomyces cerevisiae
MTNSKEDADIEEKHMYNEPVTTLFHDVEASQTHHRRGSIPLKDEKSKELYPLRSFPTRVNGEDTFSMEDGIGDEDEGEVQNAEVKRELKQRHIGMIALGGTIGTGLFIGLSTPLTNAGPVGALISYLFMGSLAYSVTQSLGEMATFIPVTSSFTVFSQRFLSPAFGAANGYMYWFSWAITFALELSVVGQVIQFWTYKVPLAAWISIFWVIITIMNLFPVKYYGEFEFWVASIKVLAIIGFLIYCFCMVCGAGVTGPVGFRYWRNPGAWGPGIISKDKNEGRFLGWVSSLINAAFTFQGTELVGITAGEAANPRKSVPRAIKKVVFRILTFYIGSLLFIGLLVPYNDPKLTQSTSYVSTSPFIIAIENSGTKVLPHIFNAVILTTIISAANSNIYVGSRILFGLSKNKLAPKFLSRTTKGGVPYIAVFVTAAFGALAYMETSTGGDKVFEWLLNITGVAGFFAWLFISISHIRFMQALKYRGISRDELPFKAKLMPGLAYYAATFMTIIIIIQGFTAFAPKFNGVSFAAAYISIFLFLAVWILFQCIFRCRFIWKIGDVDIDSDRRDIEAIVWEDHEPKTFWDKFWNVVA

SEQ ID NO: 97 - protein, 573 aa, Saccharomyces cerevisiae
MDETVNIQMSKEGQYEINSSSIIKEEEFVDEQYSGENVTKAITTERKVEDDAAKETESSPQERREVKRKLKQRHIGMIALGGTIGTGLIIGIGPPLAHAGPVGALISYLFMGTVIYSVTQSLGEMVTFIPVTSSFSVFAQRFLSPALGATNGYMYWLSWCFTFALELSVLGKVIQYWTEAVPLAAWIVIFWCLLTSMNMFPVKYYGEFEFCIASIKVIALLGFIIFSFCVVCGAGQSDGPIGFRYWRNPGAWGPGIISSDKNEGRFLGWVSSLINAAFTYQGTELVGITAGEAANPRKALPRAIKKVVVRILVFYILSLFFIGLLVPYNDPKLDSDGIFVSSSPFMISIENSGTKVLPDIFNAVVLITILSAGNSNVYIGSRVLYSLSKNSLAPRFLSNVTRGGVPYFSVLSTSVFGFLAFLEVSAGSGKAFNWLLNITGVAGFFAWLLISFSHIRFMQAIRKRGISRDDLPYKAQMMPFLAYYASFFIALIVLIQGFTAFAPTFQPIDFVAAYISIFLFLAIWLSFQVWFKCRLLWKLQDIDIDSDRRQIEELVWIEPECKTRWQRVWDVLS

SEQ ID NO: 98 - protein, 611 aa, Saccharomyces cerevisiae
MGRFSNIITSNKWDEKQNNIGEQSMQELPEDQIEHEMEAIDPSNKTTPYSIDEKQYNTKKKHGSLQGGAIADVNSITNSLTRLQVVSHETDINEDEEEAHYEDKHVKRALKQRHIGMIALGGTIGTGLFVGISTPLSNAGPVGSLIAYIFMGTIVYFVTQSLGEMATFIPVTSSITVFSKRFLSPAFGVSNGYMYWFNWAITYAVEVSVIGQVIEYWTDKVPLAAWIAIFWVIITLMNFFPVKVYGEFEFWVASVKVLAIMGYLIYALIIVCGGSHQGPIGFRYWRNPGAWGPGIISSDKSEGRFLGWVSSLINAAFTYQGTELVGITAGEAANPRKTVPRAINKVVFRIVLFYIMSLFFIGLLVPYNDSRLSASSAVIASSPFVISIQNAGTYALPDIFNAVVLITVVSAANSNVYVGSRVLYSLARTGNAPKQFGYVTRQGVPYLGVVCTAALGLLAFLVVNNNANTAFNWLINISTLAGLCAWLFISLAHIRFMQALKHRGISRDDLPFKAKLMPYGAYYAAFFVTVIIFIQGFQAFCPFKVSEFFTSYISLILLAVVFIGCQIYYKCRFIWKLEDIDIDSDRREIEAIIWEDDEPKNLWEKFWAAVA

SEQ ID NO: 99 - protein, 627 aa, Saccharomyces cerevisiae
MVNILPFHKNNRHSAGVVTCADDVSGDGSGGDTKKEEDVVQVTESPSSGSRNNHRSDNEKDDAIRMEKISKNQSASSNGTIREDLIMDVDLEKSPSVDGDSEPHKLKQGLQSRHVQLIALGGAIGTGLLVGTSSTLHTCGPAGLFISYIIISAVIYPIMCALGEMVCFLPGDGSDSAGSTANLVTRYVDPSLGFATGWNYFYCYVILVAAECTAASGVVEYWTTAVPKGVWITIFLCVVVILNFSAVKVYGESEFWFASIKILCIVGLIILSFILFWGGGPNHDRLGFRYWQHPGAFAHHLTGGSLGNFTDIYTGIIKGAFAFILGPELVCMTSAECADQRRNIAKASRRFVWRLIFFYVLGTLAISVIVPYNDPTLVNALAQGKPGAGSSPFVIGIQNAGIKVLPHIINGCILTSAWSAANAFMFASTRSLLTMAQTGQAPKCLGRINKWGVPYVAVGVSFLCSCLAYLNVSSSTADVFNWFSNISTISGFLGWMCGCIAYLRFRKAIFYNGLYDRLPFKTWGQPYTVWFSLIVIGIITITNGYAIFIPKYWRVADFIAAYITLPIFLVLWFGHKLYTRTWRQWWLPVSEIDVTTGLVEIEEKSREIEEMRLPPTGFKDKFLDALL

SEQ ID NO: 100 - protein, 608 aa, Saccharomyces cerevisiae
MKMPLKKMFTSTSPRNSSSLDSDHDAYYSKQNPDNFPVKEQEIYNIDLEENNVSSRSSTSTSPSARDDSFAVPDGKDENTRLRKDLKARHISMIAIGGSLGTGLLIGTGTALLTGGPVAMLIAYAFVGLLVFYTMACLGEMASYIPLDGFTSYASRYVDPALGFAIGYTYLFKYFILPPNQLTAAALVIQYWISRDRVNPGVWITIFLVVIVAINVVGVKFFGEFEFWLSSFKVMVMLGLILLLFIIMLGGGPNHDRLGFRYWRDPGAFKEYSTAITGGKGKFVSFVAVFVYSLFSYTGIELTGIVCSEAENPRKSVPKAIKLTVYRIIVFYLCTVFLLGMCVAYNDPRLLSTKGKSMSAAASPFVVAIQNSGIEVLPHIFNACVLVFVFSACNSDLYVSSRNLYALAIDGKAPKIFAKTSRWGVPYNALILSVLFCGLAYMNVSSGSAKIFNYFVNVVSMFGILSWITILIVYIYFDKACRAQGIDKSKFAYVAPGQRYGAYFALFFCILIALIKNFTVFLGHKFDYKTFITGYIGLPVYIISWAGYKLIYKTKVIKSTDVDLYTFKEIYDREEEEGRMKDQEKEERLKSNGKNMEWFYEKFLGNIF

SEQ ID NO: 101 - protein, 852 aa, Saccharomyces cerevisiae
MSSVNQIYDLFPNKHNIQFTDSHSQEHDTSSSLAKNDTDGTISIPGSIDTGILKSIIEEQGWNDAELYRSSIQNQRFFLTDKYTKKKHLTMEDMLSPEEEQIYQEPIQDFQTYNKRVQREYELRERMEEFFRQNTKNDLHILNEDSLNQQYSPLGPADYVLPLDRYSRMKHIASNFFRKKLGIPRKLKRRSHYNPNAEGHTKGNSSILSSTTDVIDNASYRNIAIDENVDITHKEHAIDEINEQGASGSESVVEGGSLLHDIEKVFNRSRATRKYHIQRKLKVRHIQMLSIGACFSVGLFLTSGKAFSIAGPFGTLLGFGLTGSIILATMLSFTELSTLIPVSSGFSGLASRFVEDAFGFALGWTYWISCMLALPAQVSSSTFYLSYYNNVNISKGVTAGFITLFSAFSIVVNLLDVSIMGEIVYVAGISKVIIAILMVFTMIILNAGHGNDIHEGVGFRYWDSSKSVRNLTYGLYRPTFDLADAGEGSKKGISGPKGRFLATASVMLISTFAFSGVEMTFLASGEAINPRKTIPSATKRTFSIVLISYVFLIFSVGINIYSGDPRLLSYFPGISEKRYEAIIKGTGMDWRLRTNCRGGIDYRQISVGTGYSSPWVVALQNFGLCTFASAFNAILIFFTATAGISSLFSCSRTLYAMSVQRKAPPVFEICSKRGVPYVSVIFSSLFSVIAYIAVDQTAIENFDVLANVSSASTSIIWMGLNLSFLRFYYALKQRKDIISRNDSSYPYKSPFQPYLAIYGLVGCSLFVIFMGYPNFIHHFWSTKAFFSAYGGLMFFFISYTAYKVLGTSKIQRLDQLDMDSGRREMDRTDWTEHSQYLGTYRERAKKLVTWLI

SEQ ID NO: 102 - protein, 596 aa, Saccharomyces cerevisiae
MTKERMTIDYENDGDFEYDKNKYKTITTRIKSIEPSEGWLEPSGSVGHINTIPEAGDVHVDEHEDRGSSIDDDSRTYLLYFTETRRKLENRHVQLIAISGVIGTALFVAIGKALYRGGPASLLLAFALWCVPILCITVSTAEMVCFFPVSSPFLRLATKCVDDSLAVMASWNFWFLECVQIPFEIVSVNTIIHYWRDDYSAGIPLAVQVVLYLLISICAVKYYGEMEFWLASFKIILALGLFTFTFITMLGGNPEHDRYGFRNYGESPFKKYFPDGNDVGKSSGYFQGFLACLIQASFTIAGGEYISMLAGEVKRPRKVLPKAFKQVFVRLTFLFLGSCLCVGIVCSPNDPDLTAAINEARPGAGSSPYVIAMNNLKIRILPDIVNIALITAAFSAGNAYTYCSSRTFYGMALDGYAPKIFTRCNRHGVPIYSVAISLVWALVSLLQLNSNSAVVLNWLINLITASQLINFVVLCIVYLFFRRAYHVQQDSLPKLPFRSWGQPYTAIIGLVSCSAMILIQGYTVFFPKLWNTQDFLFSYLMVFINIGIYVGYKFIWKRGKDHFKNPHEIDFSKELTEIENHEIESSFEKFQYYSKA

SEQ ID NO: 103 - protein, 558 aa, Saccharomyces cerevisiae
MAVLNLKRETVDIEETAKKDIKPYFASNVEAVDIDEDPDVSRYDPQTGVKRALKNRHISLLALGGVIGPGCLVGAGNALNKGGPLALLLGFSIIGIIAFSVMESIGEMITLYPSGGGFTTLARRFHSDALPAVCGYAYVVVFFAVLANEYNTLSSILQFWGPQVPLYGYILIFWFAFEIFQLVGVGLFGETEYWLAWLKIVGLVAYYIFSIVYISGDIRNRPAFGFHYWNSPGALSHGFKGIAIVFVFCSTFYSGTESVALAATESKNPGKAVPLAVRQTLWRILVVYIGIAVFYGATVPFDDPNLSASTKVLKSPIAIAISRAGWAGGAHLVNAFILITCISAINGSLYIGSRTLTHLAHEGLAPKILAWTDRRGVPIPAITVFNALGLISLMNVSVGAANAYSYIVNLSGVGVFIVWGVISYTHLRIRKAWVAQGRSIEELPYEALFYPWTPVLSLAANIFLALIQGWSYFVPFDAGNFVDAYILLPVGILLYIGICVFKSNHFRTVDLRSINLDEGRRKDMEADLSDQESSLASSETMKDYKSATFFRYLSNIFT

SEQ ID NO: 104 - protein, 574 aa, Saccharomyces cerevisiae
MSEGRTFLSQLNVFNKENYQFSSSTTKKEVSNSTVDADNGASDFEAGQQFATELDQGEKQLGILSCIGLICNRMLGTGVFAVSSTIYTLCGSVGLALIMWAVGAIIAISGLYVYMEFGTAIPKNGGEKNYLEAIFRKPKFFITCMYAAYIFFLGWAAGNSINTAIMFLTAADTEVTKWNQRGIGVAVVFFAFLINSLNVKIGLYLQNILGIFKIGIVLFISITGWVALGGGLKDGYQSHNFRNAFEGTETATAYGIVNALYSVIWSFVGYSNVNYALGEVKNPVRTLKIAGPTSMVFLAIIYIFVNIAYFAVVPKDKLISSKLILAADFFDIVFGGQAKRAAAALVGLSALGNVLSVIFSQGRIIQQLGREGVLPFSNFFASSKPFNSPMVGLFQHFIVCTVTILAPPPGDAYLLVQNLISYPMNIINFAISAGLLWIYWQRRQGKIEWNPPIKAGVFVTGFFTLSNLYLIIAPYVPPSNGESVYSSMPYWIHCVIAWGIFFFGGVYYVVWAQLLPRWGHYKLVSKDVLGEDGFWRVKIAKVYDDTIGDVDTQEDGVIETNIIEHYKSEQEKSL

SEQ ID NO: 105 - protein, 546 aa, Saccharomyces cerevisiae
MEPLLFNSGKANPSQDVFIDVEVGDITTKYGSTNTGSFSSMDTVEAQAIKAETARFMEVPQGRHLGVFSTVVLFVSRIMGSGIFAVPSVILLNTGGNKLIYFAIWVFSAAIAFAGLYLFLEFGSWIPKSGGRKNFLERSFERPRLLISVVFSCYSVLTGYALTGSIVFGKYVLSAFGVTDDSWSKYVSISFIIFAVLIHGVSVRHGVFIQNALGGLKLIMIVLMCFAGLYTLFFYKSTGQVAWDLPVTQVEKDSLLSVSSIATAFISSFFCFSGWDTVHTVTSEIKNPVKTLKVSGPLSLIICFVCYTMMNVAYLKVLTYEEIVSAGPLVGSVLFTKLFGPRVGGKFIAFSIAISAASNILVVIYSISRVNQEIFKEGYLPFSIHMSKNWPFDAPLPSISLCGFITIAWILILPKEGESFNYLVSMDGYGNQFFLLLVAIGLFIWRFKHKNEVPEIRASTFGVLAIITLSLYMLMAPFFADPSLNRVGFLPPYQIMSLLVIVACFFFWLVKFVLLPKFFHYKLLPKITYLHDGLIVTEWVKKPCLC

SEQ ID NO: 106 - protein, 571 aa, Saccharomyces cerevisiae
MSMSSKNENKISVEQRISTDIGQAYQLQGLGSNLRSIRSKTGAGEVNYIDAAKSVNDNQLLAEIGYKQELKRQFSTLQVFGIAFSIMGLLPSIASVMGGGLGGGPATLVWGWFVAAFFILLVGITMAEHASSIPTAGGLYYWTYYYAPEGYKEIISFIIGCSNSLALAAGVCSIDYGLAEEIAAAVTLTKDGNFEVTSGKLYGIFAGAVVVMCICTCVASGAIARLQTLSIFANLFIIVLLFIALPIGTKHRMGGFNDGDFIFGKYENLSDWNNGWQFCLAGFMPAVWTIGSFDSCVHQSEEAKDAKKSVPIGIISSIAVCWILGWLIIICLMACINPDIDSVLDSKYGFALAQIIYDSLGKKWAIAFMSLIAFCQFLMGASITTAVSRQVWAFSRDNGLPLSKYIKRVDSKYSVPFFAILAACVGSLILGLLCLIDDAATDALFSLAVAGNNLAWSTPTVFRLTSGRDLFRPGPFYLGKIWSPIVAWTGVAFQLFIIILVMFPSQQHGITKSTMNYACVIGPGIWILAGIYYKVYKKKYYHGPATNLSDDDYTEAVGADVIDTIMSKQEP

SEQ ID NO: 107 - protein, 618 aa, Saccharomyces cerevisiae
MPEYTLLADNIRENIVHFDPNGLFDNLHTIVHEDDSQENEEAEHFNYDQVLDKSLLSRGSIVGLGLGLMSPVLGMCTSMAIGLINGGPLTIMLGFLISGVCIWFSSLSLGEIVSKFPMELHVGSAMLAPEKLKLVCSWYTGWLMLIGNWTMSTSITFAGAQLTISLILMTNSNLISEAHLIFYTVIVFYLVVTVVGLVNLKFARFIETINKVCVYWIIYAIIFIDILLLVFHKGKFRSLKYALFHFDNNLSGYKSAFLSFIIGFQQSNFTLQGFSMLPALADEVKVPEKDIPRGMSNAVLLSAFSGVIFLIPIMLILPDNDLLFTNHKVLPIVNIFTKSTDSVVLSFFLVLLILGNLLFSGIGSITTSSRAVYSFSRDQAIPYYDKWTYVEPDSQSKVPKNSVVLSMIISYFLGLLALISTAAFNAFIGAAVLCLCSATFIPLVLVLFTRRRAIRSAPVKIRYKFGWFINIVSIVWLLLSMVSVCLPTQVPVTFKTMNYALMVYVFCILVITGLYFKWGKYNFRLPLADDIKAPIPSDAEETVFELEDSNVEHTLNSGTTVKESVENNSEEGFIKVHPKSSTENPFEENEENVITDYGDEHHTAEQEFDLADDRRYDI

SEQ ID NO: 108 - protein, 563 aa, Saccharomyces cerevisiae
MSIRNDNASGGYMQPDQSSNASMHKRDLRVEEEIKPLDDMDSKGAVAADGEVHLRKSFSLWSILGVGFGLTNSWFGISTSMVAGISSGGPMMIVYGIIIVALISICIGTSLGELSSAYPHAGGQFWWSLKLAPPKYKRFAAYMCGSFAYAGSVFTSASTTLSVATEVVGMYALTHPEFIPKRWHIFVCFELLHLFLMFFNCYGKSLPIISSSSLYISLLSFFTITITVLACSHGKFNDAKFVFATFNNETGWKNGGIAFIVGLINPAWSFSCLDCATHMAFEVEKPERVIPIAIMGTVAIGFVTSFCYVIAMFFSIQDLDAVLSSTTGAPILDIYNQALGNKSGAIFLGCLILFTSFGCVIACHTWQARLCWSFARDNGLPLSRLWSQVNPHTGVPLNAHLMSCAWITLIGLLYLASSTAFQSLITGCIAFLLLSYIIPVICLLAKKRNIAHGPFWLGKFGFFSNIVLLGWTVFSVVFFSFPPVLPVTKDNMNYVCVVIVGYTAYSILYWKYKGKKEFHALEESENEQAEYSNNFDTIEDSREFSVAASDVELENEHVPWGKK

SEQ ID NO: 109 - protein, 561 aa, Saccharomyces cerevisiae
MNRVGAVFLFVYERNFFLSIVPDRHRTEIRMSSSERSEVKFDKHFNWWSLLGIAFSLSCSWVGISASMAVGIASGGPLLIIYGLIIAAFFSLMCGISLGDFAAILPNSSGGSFWVLKMLEQESVTLKTPEYEDPSDDDEEVFLENYCQTFNVEVSSKFQKVSSMVVGLLNYFGAIFTTASICSSLSMSCIGIHKLLHPDYELKHWHVFVGYECINAVLTLFNIYSTPLPYISQFGLYTSLLSFAMTFIICIVSRSDNTVDPWPKASNIFGSFDNQTGWNSSGMAFVVGLVNPIWAFVGIDSATHMIDEVGYSKSRFLVPKVIITTIIVGFVTSFIYCVGLFFCITDQTAVVESILPIVEIFYQATGNRNLSVFLQCMCITTGFVSGIASGTWQSRILQSFGKSYAPFYKEGSLGNKSLKKLAVLTPGFKSPLYAHFLSQICVTIIGCIFMGSSTAFNAIITACITLLLMSYAVPSFIFLFVIKKEKFIHRIESDVNCVSRPNRRRMSMIPHIICILWTLFCLVFLSFPYTLPVTAGNMNYTSVVYAVVFCIISIVVFPTCI

SEQ ID NO: 110 - protein, 492 aa, Saccharomyces cerevisiae
MESRTTGPLTTETYDGPTVAFMILGAALVFFMVPGLGFLYSGLARRKSALALIWVVLMATLVGILQWYFWGYSLAFSKSAPNNKFIGNLDSFGFRNVYGKKFDEDAYPELAYATFQMMFSCVNLSIIAGATAERGRLLPHMVFLFILATIGYCPVTYWIWSPGGWAYQWGVLDWAGGGNIEILSAVSGFVYSWFLGKRNEKLLINFRPHNVSLVTLGTSILWFGWLLFNSASSLSPNLRSVYAFMNTCLSAITGGMTWCLLDYRSEKKWSTVGLCSGIISGLVAATPSSGCITLYGSLIQGIVAGVVCNFATKLKYYAKVDDAMDILAEHGVAGVIGLIFNALFGADWVIGMDGTTEHEGGWVTHNYKQMYKQIAYIAASIGYTAAVTAIICFVLGYIPGMRLRISEEAEEAGMDEDQIGEFAYDYVEVRRDYYLWGVDEDSQRSDVNHRVNNAHLAAERSSSGTNSSSDGNGEMIQSEKILPIHQEDPANR

SEQ ID NO: 111 - protein, 499 aa, Saccharomyces cerevisiae
MSYNFTGTPTGEGTGGNSLTTDLNTQFDLANMGWIGVASAGVWIMVPGIGLLYSGLSRKKHALSLLWASMMASAVCIFQWFFWGYSLAFSHNTRGNGFIGTLEFFGFRNVLGAPSSVSSLPDILFAVYQGMFAAVTGALMLGGACERARLFPMMVFLFLWMTIVYCPIACWVWNAEGWLVKLGSLDYAGGLCVHLTSGHGGLVYALILGKRNDPVTRKGMPKYKPHSVTSVVLGTVFLWFGWMFFNGGSAGNATIRAWYSIMSTNLAAACGGLTWMVIDYFRCGRKWTTVGLCSGIIAGLVGITPAAGFVPIWSAVVIGVVTGAGCNLAVDLKSLLRIDDGLDCYSIHGVGGCIGSVLTGIFAADYVNATAGSYISPIDGGWINHHYKQVGYQLAGICAALAWTVTVTSILLLTMNAIPFLKLRLSADEEELGTDAAQIGEFTYEESTAYIPEPIRSKTSAQMPPPHENIDDKIVGNTDAEKNSTPSDASSTKNTDHIV

SEQ ID NO: 112 - protein, 489 aa, Saccharomyces cerevisiae
MARGDGHLWTETYDSSTVAFMILGAALVFFMVPGLGFLYSGLARRKSALALIWVVIMATLVGILQWYFWGYSLAFSKTATNNKFIGNLDSFGFRNVYGKISDDSTYPELIYAIFQMMFMCVALSIIAGATAERGKLFPHMVFLFVFATLVYCPITYWIWAPGGWAYQWGVLDWAGGGNIEILSAVAGFVYSYFLGRRKENLLINFRPHNVSMVTLGTSILWFGWLLFNAASSLSPNMRSVYAFMNTCLSATTGGMTWCLLDYRSEKKWSTVGLCSGIICGLVAATPSSGCITLYGSLIQGIIAGVVCNFATKIKYYLKVDDSLDLLAEHGIAGVVGLIFNALFAADWVIGMDGTTKHKGGWLTHNWKQMYIQIAYIGASAGYCAVVTAIICFVLGKIPGVHLRVTEEAEALGLDEDQIGEFAYDYVEVRRDYYQWGVDTDALHTTCNGANSASETNPTEDSQNSSLSSATVSGQNEKSNNPKLHHAKEA

SEQ ID NO: 113 - protein, 543 aa, Saccharomyces cerevisiae
MSADASTNSNASLDEKNLNITSEAEIKNEDVTAEPVLSTVLSPNGKIVYISDKVDEAMKLAEEAKEIEVTPEEDRKLRWKIDYCMFPLMCILYAVQFMDKISTSSAAVMGLRTDLKMHGDQYSWVTSAFYFGYLFMNLGPVQFIFQRTSHMSKMLAVFIVIWGMLLALHAAPTVKYPSFIVLRVLLGCAESVVTPCFTIITAQYWKTEEQFTRVSIWFGMNGLGSILINAIAYGVYIHQDSYAIKGWRTLFVITGVITIFIGILIFLWIPDDPSKARFLSKREKLMVVQRIRSNQQGFGNHEIKKYQIIEALKDVRTWLYFLFTVSSNIPNGGISSFMSILLNSDFGYSSKETLLMGLPTGAVELVGCPLFGILAVYAANKKIPFWKYKLSWAIFAAVLALIASCMLGFATNSKKARLAGAYLWYISPVSFICVLSNISANSSGYSKKWTVSSINLVAYAAANLAGPQTFIAKQAPKYHGAKVAMVVCYAVMIVLLSILLIVNLRENKRRDKIAAERGFPEETENLEFSDLTDFENPNFRYTL

SEQ ID NO: 114 - protein, 531 aa, Saccharomyces cerevisiae
MSKVDVKIGADSISSSDEILVPSRLADVTLAFMEENDAAVPEITPEQEKKLKRKLFLTIFTFVSAINLLLYMDKATLSYDSILGFFEDTGLTQNTYNTVNTLFYVGFAIGQFPGQYLAQKLPLGKFLGGLLATWTILIFLSCTAYNFSGVVALRFFLGLTESVVIPILITTMGMFFDASERAAAQPFFFAACMGSPIPTGFIAYGVLHITNPSISLWKIFTIIIGGLTFIMTVVVILWFPNNPADVKFFSIQERVWIIRRVQASTGSSIEQKVFKKSQFREAMKDYITWLFGLFFLLQQLANNLPYQQNLLFEGMGGVDALGSTLVSVAGAGFAVVCAFIATLMLAKWKNISALTAIFWTLPALVGSIAAAALPWDNKIGILANICMAGQIFGIPFIIALSWASSSASGYTKKLTRSSVSLFAMGIANIISPQIWREKDSPRFLPAWIVQIVLSFSLAPAILLLIHFILKRRNNQRLKNYDENLQNYLDRIQLIESENPSSIEEGKVVTHENNLAVFDLTDLENETFIYPL

SEQ ID NO: 115 - protein, 534 aa, Saccharomyces cerevisiae
MSNKFTMESPKHLVDDVLFISPTNDGSEEKPTEVTFQEDEGHDASLHNRSHDKKSELATEREIMATTTDDDGIPSPSHPMEKRVLRKMDIYLIPLMGMLYFLSNLDKSNIGNAEVAGLSKDIHLVGTQYNTCVTVFFATYVLFDPIGTNLLKIMGPPLMMSICLTCFGAISLGTAWVKNYAQLIVVRLLLGAFEGMIYPAINMYLSVCYRREQYALRFAFVFSAACLSSSFGGLIAYGCSKISGSLKDWQYIYIVEGCISLGFVPFYAFGLSKNLEDSWFFNKEEKEYISERYKTMNTFDPDEKFEWFQVWQAVKDVKTWASAVALFGIDLTTFGLTVFLPIIITSMGFTNVRAQLMTVPIYFLTAIVFFICAVWSDRIKLRSPFILGACLTTSIGIAIVLGSQVHGVRYFGVYILCMGIYVNAACNCLWLSGNTGNYFKRATALGINLFFGSGSGLVSGQIFVAKDKPRYIKGLSISLAFQVFSIFMTVVQIFLYKRENDKKKAIIDRCNELGEPIPYDERLSDKNPEFKYMY

SEQ ID NO: 116 - protein, 593 aa, Saccharomyces cerevisiae
MTISNKSWRSYFPHLRKLPEDDQYLYSDDTNSSIIAEEELHHSVDKSSKTDVTAETTAVEPHPHNLRHDLPYEVRDEAGRKWWKYFDEFEYRVNKEYKKSRKWYEFLYPNHTTQTKAERRLLYKLDIIIALYFFMLCWSKSVDLNNYTNAYVSNMKEDLNMKGNDYVYTSTIANVGAIVFQLPFMYLLPRFPSHIILPVMDLGWTWFTFACYRANSLAELRAYRFILSAFGAAYYPVSQYILGCWYAPDEINSRVCLFFCGQQLGSVTSGLLQSRIFKSLNGVHGLAGWRWMFLIDAIAISLPTAIIGFFVIPGVPSKCYSLFLTDEEIRIARARNKRNQIKDGVDKSKLAPLWSRKLWKKVFCTPAFWVLVVFDTCSWNNMTAYSGSYTLWLKSNTKYSIAQVNNLSVIPACLGFAYVIFCAFGADLFRCKWIFMVFAAIMNTVSCALLIKWDIPSKAKWYAFFTTYFSVAASPCLWSFINDFLRFDPQVKAITWIAIYSFSQSTYAWIPTLAWPTVESPRFKTGYTVSLIFGAIYGLWTFVVLFFYKRNEKKHALGNGIILYDSNKGEELPEFVKKNMEERDGYYYLKRSS

SEQ ID NO: 117 - protein, 512 aa, Saccharomyces cerevisiae
MMKESKSITQHEVERESVSSKRAIKKRLLLFKIDLFVLSFVCLQYWINYVDRVGFTNAYISGMKEDLKMVGNDLTVSNTVFMIGYIVGMVPNNLMLLCVPPRIWLSFCTFAWGLLTLGMYKVTSFKHICAIRFFQALFESCTFSGTHFVLGSWYKEDELPIRSAIFTGSGLVGSMFSGFMQTSIFTHLNGRNGLAGWRWLFIIDFCITLPIAIYGFIFFPGLPDQTSAVSKFSMTRYIFNEQELHYARRRLPARDESTRLDWSTIPRVLKRWHWWMFSLVWVLGGENLGFASNSTFALWLQNQKYTLAQRNNYPSGIFAVGIVSTLCSAVYMSKIPRARHWHVSVFISLVMVIVAVLIRADPLNPKVVFSAQYLGGVAYAGQAVFFSWANIICHADLQERAIVLASMNMFSGAVNAWWSILFFASDMVPKFERGCYALLATAISSGIVSVVIRSLQIKENLSKKQVPYIDANDMPGEDDDDDNQDNENDGDDESMEVELHNEEMAEISNPFR

SEQ ID NO: 118 - protein, 593 aa, Saccharomyces cerevisiae
MYSIVKEIIVDPYKRLKWGFIPVKRQVEDLPDDLNSTEIVTISNSIQSHETAENFITTTSEKDQLHFETSSYSEHKDNVNVTRSYEYRDEADRPWWRFFDEQEYRINEKERSHNKWYSWFKQGTSFKEKKLLIKLDVLLAFYSCIAYWVKYLDTVNINNAYVSGMKEDLGFQGNDLVHTQVMYTVGNIIFQLPFLIYLNKLPLNYVLPSLDLCWSLLTVGAAYVNSVPHLKAIRFFIGAFEAPSYLAYQYLFGSFYKHDEMVRRSAFYYLGQYIGILSAGGIQSAVYSSLNGVNGLEGWRWNFIIDAIVSVVVGLIGFYSLPGDPYNCYSIFLTDDEIRLARKRLKENQTGKSDFETKVFDIKLWKTIFSDWKIYILTLWNIFCWNDSNVSSGAYLLWLKSLKRYSIPKLNQLSMITPGLGMVYLMLTGIIADKLHSRWFAIIFTQVFNIIGNSILAAWDVAEGAKWFAFMLQCFGWAMAPVLYSWQNDICRRDAQTRAITLVTMNIMAQSSTAWISVLVWKTEEAPRYLKGFTFTACSAFCLSIWTFVVLYFYKRDERNNAKKNGIVLYNSKHGVEKPTSKDVETLSVSDEK

SEQ ID NO: 119 - protein, 633 aa, Saccharomyces cerevisiae
MPDNLSLHLSGSSKRLNSRQLMESSNETFAPNNVDLEKEYKSSQSNITTEVYEASSFEEKVSSEKPQYSSFWKKIYYEYVVVDKSILGVSILDSFMYNQDLKPVEKERRVWSWYNYCYFWLAECFNINTWQIAATGLQLGLNWWQCWITIWIGYGFVGAFVVLASRVGSAYHLSFPISSRASFGIFFSLWPVINRVVMAIVWYSVQAYIAATPVSLMLKSIFGKDLQDKIPDHFGSPNATTYEFMCFFIFWAASLPFLLVPPHKIRHLFTVKAVLVPFASFGFLIWAIRRAHGRIALGSLTDVQPHGSAFSWAFLRSLMGCMANFSTMVINAPDFSRFSKNPNSALWSQLVCIPFLFSITCLIGILVTAAGYEIYGINYWSPLDVLEKFLQTTYNKGTRAGVFLISFVFAVAQLGTNISANSLSCGTDMSAIFPKFINIKRGSLFCAAMALCICPWNLMATSSKFTMALSAYAIFLSSIAGVVCSDYFVVRRGYIKLTHIYSHQKGSFYMYGNRFGINWRALAAYLCGVAPCLPGFIAEVGAPAIKVSDGAMKLYYLSYWVGYGLSFSSYTALCYFFPVPGCPVNNIIKDKGWFQRWANVDDFEEEWKDTIERDDLVDDNISVYEHEHEKTFI

SEQ ID NO: 120 - protein, 635 aa, Saccharomyces cerevisiae
MANDALSAIFSNPSRKGVQPSTSIVSYTNNEDDIIDVENGKFNKNKNINTNVYVDNSSIEESEVVPLPETKSIWSKIYYDFIVLDKTTLNVSLKESFLYNRDLKPVEEERRCWSWFNYLYFWLADCFNINTWQIAGTGLQLGLNWWQCWLTVWIGYTFAGIFVVLNSRFGSAYHLSFPITVRASFGIFFSMWPIINRVVMAIVWYAVQAWLGATPVALMLKSIFGKNLEDRIPNHFGSPNSTTFEFMCFFIFWVVSIPFVLVAPHKIRHLFTVKAALIPFAAFGFLIWALKKSHGKIELGTLNDYSPHGSEFSWIFVRSLMACVANFAALIINAPDFGRFAKNPQASLWPQLVAIPLFFAITCLIGIIVTAAGYHLYGVNYWSPLDVLGQFLETTYTRGTRAGVFLISFVFALAQLGTNISANSLACGADMTALFPRYINIRRGSLFCVAMALCICPWNLMASSSKFTSALGAYAIFLSSIAGVICADYFVVRRGYVKLTHLFLAQKGSFYMFGNKFGANWRAFVAYICGIAPNLPGFIGDVGAPKITVSEGAMRLYYLGYPVGFFISAVIYLILCYFFPVPGTPVTNFLTEKGWFQRWAYVEDFEQDWKNELRRDDLCDDTVSIYDGTEEKIVY

SEQ ID NO: 121 - protein, 639 aa, Saccharomyces cerevisiae
MPVSDSGFDNSSKTMKDDTIPTEDYEEITKESEMGDATKITSKIDANVIEKKDTDSENNITIAQDDEKVSWLQRVVEFFEVKNDSTDLADHKPENPIRTFKDLQESLRSTYLYNTDLRPVEAKRRTWTWKQYIFFWISGSFNVNTWQISATGLQLGLNWWQTWICIWVGYTFVAFFLILGSKVGNNYHISFPISSRVSFGIYFSIWIVINRVVMACVWNSTLAYIGSQCVQLMLKAIFGTNLNTRIKDTIKNPNLTNFEFMCFMVFWVACLPFLWFPPDKLRHIFALKSAITPFAAFGFLIWTLCKAKGHLALGSLNDNGGAISKTVLAWSVIRAIMSALDNFSTLILNAPDFTRFGKTYKSSVYSQLIALPVCYAIISLIGILSVSAAYTLYGVNYWSPLDILNRYLDNYTSGNRAGVFLISFIFAFDQLGANLSGNSIPAGTDLTALLPKFINIRRGSYICALISLAICPWDLLSSSSKFTTALAAYAVFLSAIAGVISADYFIVRKGYVNIFHCYTDKPGSYYMYNKYGTNWRAVVAYIFGIAPNFAGFLGSVGVSVPIGAMKVYYLNYFVGYLLAALSYCILVYFYPIKGIPGDAKITDRKWLEEWVEVEEFGTEREAFEEYGGVSTGYEKIRYI

SEQ ID NO: 122 - protein, 598 aa, Saccharomyces cerevisiae
MSFGSKVSRALRFLEIPVKDRASVSFLKNPDLQPIKSANQTWGFWSNFAYWGVMSFSVGTWMSASSALGVGLSYPETIGTFIVGDVLTIIFTLANSCPGYDWKVGFTLAQRFVFGIYGSAFGIIIRILMSIVNYGSNAWVGGLCINMILDSWSHHYLHLPNTLSSKVAMTTKELIGFIIFHVLTAFCYLMKPYHMNYILIWSCVATFFSMLGMVIYLAKQAHGVGELFTSTKSTATGSTKAWAWVYMISYWFGSVSPGSTNQSDYSRFGSSNWAIWAGTICALLIPTTLIPVFGVIGASTCDKLYGEQYWMPMDIFNHWLTTNYSAGARAGAFFCGLSFVLSQMSYTISNCGFASGMDLAGLLPKYVDIKRGALFAACVSWACLPWNFYNSSSTFLTVMSSFGVVMTPIISVMICDNFLIRKRQYSITNAFILKGEYYFTKGVNWRAIVAWVCGMTPGLPGIAWEVNNDYFHNTGIVNFFYGDSFFSFLISFFVYWGLCLLFPFKITVKHDDKDYYGAFTDEEARKKGMVPYSEISEEEIRAYTLGEGYTTGHEYRPEGSDDEIPELVKTSSENTNEFEIVHHKNNEKQSSTASEKAA

SEQ ID NO: 123 - protein, 599 aa, Saccharomyces cerevisiae
MSFGTRISRALRFLEIPVKNRASVNFLRNPDLQPIKSVNQTWGFWSNFAYWGVLSFNVGMWIGGSSALTVGLSYSETIGAFIIADLLTILFALANSCPGYDWKVGFTLAQRFVFGIYGSALGIIIRILMSIVYYGSNAWLGGLCVNMILDSWSHHYLHLPNTLSSKVAMTTKELIGFIIFHILTAFCYFMKPYHMNYILIWSCVGTFFAMLGMVIYLTKSAHGVGDLFTSTHSTVTGSKKAWAWVYTISYWYGSVSPGCTNQSDFSRFGSSNCAIWTGTIVALLIPATLIPVFGIIGASACEKLYGQTFWMPMDIFDNWLTTNYSAGARAATFFCGFCFVMSQISYTISNCGFASGMDLAGLLPKYVDIKRGAIFAACVSWACLPWNFYNSSSTFLTVMSSFGVVMTPIITVMICDNFLIRKRQYSVTNAFVLKGEYYFTKGVNWRAIVAWVCGMAPGLPGIAWEVNNDYFHNTGIINFFYGDSFFSFLISFFVYWGLCLLFPFKITVKHDDKDYYGAFTDEEARKKGMVPYSEISEEEIRAYTLGECFTSGHEYKPESSDDELPELTKTSSENTKVFEIVHQKDNEKESSTSSEKQIA

SEQ ID NO: 124 - protein, 598 aa, Saccharomyces cerevisiae
MSFSSIVSKFLRYLEIPAKNRTAVNFLRNPDLQPIKSANQTWGFWSNLAYWGAVSFTAGTWMSGSAALSVGLSYPETIVSFLLGNVLTIIFTMANSYPGYDWKIGFTLAQRFVFGIYGSAFGIIIRILMSIVNYGSNAWLGGLSINMILDSWSHHYLHLPNTLSPSVAMTTKQLVGFIIFHVLTALCYFMKPYHMNYLLIWSCVATCFAMLGIVIYLTKNAHGVGELFTSTKSTVTGSKRAWAWVYMISYWFGSISPGSTNQSDYSRFGSSNLAIWTGSVCALLIPATLVPIFGVISASTCDKLYGKQFWMPMDIFDYWLTNNYSAGARAGAFFCGLCFTMSQMSSTISNCGFATGMDMAGLLPKYVDIKRGALFCACISWACLPWNFYNSSSTFLTVMSSFGVVMTPIIAVMICDNFLIRKRQYSITNAFILKGEYYFTKGVNWRAIVAWVCGMAPGLPGIAWEVNNNYFHDSGIVKFFYGDSFFSFLISFFVYWGLCVFFPFKITVRHDDKDYYGAFTDEEARKKGMIPYSEISEEEIRAYTLGECYTTGHEYKPESSDNESPELIKTSSENTNVFEIVHQKDDEKHSFSTTQQVV

SEQ ID NO: 125 - protein, 533 aa, Saccharomyces cerevisiae
MLEEGNNVYEIQDLEKRSPVIGSSLENEKKVAASETFTATSEDDQQYIVESSEATKLSWFHKFFASLNAETKGVEPVTEDEKTDDSILNAASMWFSANMVIASYALGALGPMVFGLNFGQSVLVIIFFNIMGLIFVAFFSVFGAELGLRQMILSRYLVGNVTARIFSLINVIACVGWGIVNTSVSAQLLNMVNEGSGHVCPIWAGCLIIIGGTVLVTFFGYSVIHAYEKWSWVPNFAVFLVIIAQLSRSGKFKGGEWVGGATTAGSVLSFGSSIFGFAAGWTTYAADYTVYMPKSTNKYKIFFSLVAGLAFPLFFTMILGAASAMAALNDPTWKAYYDKNAMGGVIYAILVPNSLNGFGQFCCVLLALSTIANNIPNMYTVALSAQALWAPLAKIPRVVWTMAGNAATLGISIPATYYFDGFMENFMDSIGYYLAIYIAISCSEHFFYRRSFSAYNIDDWDNWEHLPIGIAGTAALIVGAFGVALGMCQTYWVGEIGRLIGKYGGDIGFELGASWAFIIYNILRPLELKYFGR

SEQ ID NO: 126 - protein, 579 aa, Saccharomyces cerevisiae
MNRDNMDTTKRKEDHTKHTTDVIEFYEEGTAASSLNIATEKANSSPSILRRIINRAAWLSKKVDAMGVESTGIQRISPYERGTSKKQFLHVAGLWLSATGGLSSMSSFLLGPLLFGLSFRESVASSLISVTIGCLIAAYCSIMGPQSGCRQMVTARYLFGWWFVKLVALASIIGVMGWSVVNSVVGGEMLAAISNDKVPLWVGIVIVTVCSFLVAIFGIKQVIKVETYLSVPVLTAFLLLYISSSDKYSFVNAYVSKGNLDSSTRKGNWMSFFSLCYSITATWGSITADYYILFPEDTPYIQIFCLTFFGTFLPTCFVGILGLLLASVAMSYKPWSVEYDSHGMGGLLWAGFQRWNGFGKFCVVVLVFSLVSNNIINTYSAAFSIQLSSVFCAKIPRWFWSIVCTIICLVCALIGRNHFSTILGNFLPMIGYWISMYFILLFEENLVFRRFFLHLYTKEFPTVTGEINGPELVGSSKEVEKDAVTNIHLLKRKHKVTKHRYNWDKWEDYEVLTHGYAATFAFIVGVAGVVVGMAQAYWIGPIAAKFGEYGGDVAMWLSMAFSGVVYPPCRYLELRKFGR

SEQ ID NO: 127 - protein, 735 aa, Saccharomyces cerevisiae
MGEFKPPLPQGAGYAIVLGLGAVFAGMMVLTTYLLKRYQKEIITAEEFTTAGRSVKTGLVAAAVVSSWIWCSTLLTSSTKEYADGIFGGYAYAAGACFQIIAFAILAIKTKQMAPNAHTYLELVRTRYGKIGHGCYLFYAIATNILVTSMLLTSGSAVFSDLTGMNTIASCFLLPVGVVVYTLFGGIKATFLTDYMHTCVIIIIVLVFAFKVYATSDVLGSPGKVYDLVREAAKRHPVDGNYQGEYMTMTSKSAGILLIINLIGNFGTVFLDNGYWNKAISASPAASLKAYAIGGLAWFAVPSLISLTMGLACLAVETSPNFPTYPDPLTSFQANSGLVLPAAAIAIMGKGGAVASLLMIFMAVTSAMSAELIAVSSVFTYDIYREYIDPRASGKKLIYTSHVACIFFGLAMSGFSVGLYYGGISMGYIYEMMGIIISSAVLPVVLTLCSKDMNLVAAVVSPILGTGLAIMSWLVCTKSLYKELTVDTTFMDYPMLTGNLVALLSPAIFIPILTYVFKPQNFDWEKMKDITRVDETAELVQADPDIQLYDAEANDKEQEEETNSLVSDSEKNDVRVNNEKLIEPNLGVVISNAIFQEDDTQLQNELDEEQRELARGLKIAYFLCVFFALAFLVVWPMPMYGSKYIFSKKFFTGWVVVMIIWLFFSAFAVCIYPLWEGRHGIYTTLRGLYWDLSGQTYKLREWQNSNPQDLHVVTSQISARAHRQSSHFGQVDEII

SEQ ID NO: 128 - protein, 601 aa, Saccharomyces cerevisiae
MLNHPSQGSDDAQDEKQGDFPVIEEEKTQAVTLKDSYVSDDVANSTERYNLSPSPEDEDFEGPTEEEMQTLRHVGGKIPMRCWLIAIVELSERFSYYGLSAPFQNYMEYGPNDSPKGVLSLNSQGATGLSYFFQFWCYVTPVFGGYVADTFWGKYNTICCGTAIYIAGIFILFITSIPSVGNRDSAIGGFIAAIILIGIATGMIKANLSVLIADQLPKRKPSIKVLKSGERVIVDSNITLQNVFMFFYFMINVGSLSLMATTELEYHKGFWAAYLLPFCFFWIAVVTLIFGKKQYIQRPIGDKVIAKSFKVCWILTKNKFDFNAAKPSVHPEKNYPWNDKFVDEIKRALAACKVFIFYPIYWTQYGTMISSFITQASMMELHGIPNDFLQAFDSIALIIFIPIFEKFVYPFIRRYTPLKPITKIFFGFMFGSFAMTWAAVLQSFVYKAGPWYNEPLGHNTPNHVHVCWQIPAYVLISFSEIFASITGLEYAYSKAPASMKSFIMSIFLLTNAFGSAIGCALSPVTVDPKFTWLFTGLAVACFISGCLFWLCFRKYNDTEEEMNAMDYEEEDEFDLNPISAPKANDIEILEPMESLRSTTKY

SEQ ID NO: 129 - protein, 799 aa, Saccharomyces cerevisiae
MSTIYRESDSLESEPSPTPTTIPIQINMEEEKKDAFVKNIDEDVNNLTATTDEEDRDPESQKFDRHSIQEEGLVWKGDPTYLPNSPYPEVRSAVSIEDDPTIRLNHWRTWFLTTVFVVVFAGVNQFFSLRYPSLEINFLVAQVVCYPIGRILALLPDWKCSKVPFFDLNPGPFTKKEHAVVTIAVALTSSTAYAMYILNAQGSFYNMKLNVGYQFLLVWTSQMIGYGAAGLTRRWVVNPASSIWPQTLISVSLFDSLHSRKVEKTVANGWTMPRYRFFLIVLIGSFIWYWVPGFLFTGLSYFNVILWGSKTRHNFIANTIFGTQSGLGALPITFDYTQVSQAMSGSVFATPFYVSANTYASVLIFFVIVLPCLYFTNTWYAKYMPVISGSTYDNTQNKYNVTKILNEDYSINLEKYKEYSPVFVPFSYLLSYALNFAAVIAVFVHCILYHGKDIVAKFKDRKNGGTDIHMRIYSKNYKDCPDWWYLLLQIVMIGLGFVAVCCFDTKFPAWAFVIAILISLVNFIPQGILEAMTNQHVGLNIITELICGYMLPLRPMANLLFKLYGFIVMRQGLNLSRDLKLAMYMKVSPRLIFAVQIYATIISGMVNVGVQEWMMHNIDGLCTTDQPNGFTCANGRTVFNASIIWSLPKYLFSSGRIYNPLMWFFLIGLLFPLAVYAVQWKFPKFKFAKHIHTPVFFTGPGNIPPSTPYNYSLFFAMSFCLNLIRKRWRAWFNKYNFVMGAGVEAGVAISVVIIFLCVQYPGGKLSWWGNNVWKRTYDNDYKKFYTLKKGETFGYDKWW

SEQ ID NO: 130 - protein, 877 aa, Saccharomyces cerevisiae
MSETVKDKVIIDEKVSTKGTVDYAEGAEYSERLSNHSSDFSQWYTDEQILHFMKKLGYENRTLYDIPEDVAYILKKMPELTLEDSFKILKDSIIYFKDDENIPHDQYEEWKRLVDLEDLDSKEGIDEYDSFDIRAFASAIKFHSPYQEVRAVVDPEDDPTIPVETFRAYFLAIIWSVIGSGFNEFFSHRVVSISLNTPIIQMFLYICGKAWAKTIPCWTITIRGRKYGINIDKPWTQKEQMFSTLLYAICQGAFYTHYNILTQKLFYHSAFSFGYQFLLSLSVQFIGFGFAGILRKFVVYPARALWPTVMPTIAINKALLGKEKHESGMSRYKFFFLTFFIMFIYNWFPTYIINILNTFNWMTWIKPSNINLANITGGVTGLGINPISSFDWNVISFNSPLVYPFWSYLTQYLGCILAALIVIAVYYSNYMSCQYLPIFTNSLYTNTGHSFKVTEVLDSDNKLDVKKYQSYSPPYYSAGNLVSYGAFICAYPLMITWSFIVHSKLLFNAFKDWALNLWAMRKLKSWVTMFKSDYRALDDYDDPHSNAMKNYKEVPDWWYFAILIGSLVVGIAVVEHYPTNTPVWGLFVCLGFNFVFLIPTTILQATTGYSFGLNLLIEMVMGYALPGNPIAIMILKAFGYNIDGQADNYVSNLKIAHYCKIPPMALFRGQCVIVFIQIFVNLGVLNWQISNIKDFCTPHQNAKFTCPDAVTYYNASVVWGAIGPKRIFNYIYPIFKWCWLIGACIGIFFGVWKRWGKFYPRYFDPMLFVGGMLNMSPPYNLMYYTSGMIVSYISQYYMKRHHLNLWEKYNYVLSAGFSTGLVLSAIIIFFAVQYKDTAFNWWGNTVPYAGADGVGYPLKNITDTANGYFGYAPGHYP

SEQ ID NO: 131 - protein, 275 aa, Saccharomyces cerevisiae
MTSSASSPQDLEKGVNTLENIETLPQQGSIAGVSQGFPNIQEIYSDRDFITLGSSTYRRRDLLNALDRGDGEEGNCAKYTPHQFANPVPLGLASFSLSCLVLSLINANVRGVTDGKWALSLFMFFGGAIELFAGLLCFVIGDTYAMTVFSSFGGFWICYGYGLTDTDNLVSGYTDPTMLNNVIGFFLAGWTVFTFLMLMCTLKSTWGLFLLLTFLDLTFLLLCIGTFIDNNNLKMAGGYFGILSSCCGWYSLYCSVVSPSNSYLAFRAHTMPNAP

SEQ ID NO: 132 - protein, 586 aa, Saccharomyces cerevisiae
MSRSNSIYTEDIEMYPTHNEQHLTREYTKPDGQTKSEKLNFEGAYINSHGTLSKTTTREIEGDLDSETSSHSSDDKVDPTQQITAETKAPYTLLSYGQKWGMVAILTMCGFWSSLGSPIYYPALRQLEKQFNVDENMVNVTVVVYLLFQGISPTVSGGLADCFGRRPIILAGMLIYVIASIGLACAPSYGVIIFLRCIQSIGISPTIAISSGVVGDFTLKHERGTFVGATSGFVLLGQCFGSLIGAVLTARWDWRAIFWFLTIGCGSCFLIAFLILPETKRTIAGNLSIKPKRFINRAPIFLLGPVRRRFKYDNPDYETLDPTIPKLDLSSAGKILVLPEIILSLFPSGLLFAMWTLMLSSISSGLSVAPYNYHLVIIGVCYLPGGIGGLMGSFFTGRIIDMYFKRKIKKFEQDKANGLIPQDAEINMFKVRLVCLLPQNFLAVVAYLLFGWSIDKGWRIESILITSFVCSYCAMSTLSTSTTLLVDLYPTKSSTASSCFNFVRCSLSTIFMGCFAKMKAAMTVGGTFTFLCALVFFFNFLMFIPMKYGMKWREDRLLKQQRQSWLNTLAVKAKKGTKRDQNDNHN

SEQ ID NO: 133 - protein, 586 aa, Saccharomyces cerevisiae
MSDHSPISNKENHLLPSDSSRSSSSDMHSTGTTGTTGVEPVDFTGEGAKYTTATEGNGGADLAIQRTTTMNSAAESEVNITRRLTKILTGSVNEPDRVEVDYTNCAPMGGDRPYPPSLPSRDLYEVTFDGPNDPLHPFNWPMKKKVLLCLVLCLDSIAIAMCSSIFASAVPQICEIYHVIEVVAILGITLFVLGFAASPVIYAPLSELYGRKGVLVLSAFGFALFQFAVATAENLQTIFICRFFGGFIGAAPMAVVPAAFADMFDTNVRGKAIALFSLGVFVGPILSPVMGSYIAQRTTWRWLEYVVGCFASAVFVAIVLFFEETHHPTILVNKAKQMRKQSNNWGIHAAHEDVELSIKDIVQKTVTRPIIMLFVEPLLLFVTIYNSFVYGILYLLLEAYPLVFVEGYGFTENGELPYIALIIGMMVCAAFIWYMDNDYLKRCRAKGKLVPEARLYAMVIAGTVFPIGILWFCWTGYYPHKIHWMVPTVGGAFIGFGLMGIFLPCLNYIIESYLLLAASAVAANTFMRSAFGACFPLFAGYMFRGMGIGWAGLLLGLFAAAMIPVPLLFLKYGESIRKKSKYAYAA

SEQ ID NO: 134 - protein, 902 aa, Saccharomyces cerevisiae
MEQINSNSRKKKQQLEVFKYFASVLTKEDKPISISNGMLDMPTVNSSKLTAGNGKPDTEKLTGELILTYDDFIELISSSKTIYSKFTDHSFNLNQIPKNVFGCIFFAIDEQNKGYLTLNDWFYFNNLLEYDNYHLIILYEFFRKFDVENLKAKQKKELGSSSFNLKAADDRIKSINYGNRFLSFDDLLLNLNQFKDTIRLLHESIDDNFVKDNKLLLDWNDFRFLKFYKCYHENEEYLSLNSLVTILQNDLKNEKIFIGFDRLAQMDSQGHRLALSKNQLTYLLRLFYSHRVSADIFSSLNLSNTELLKADNNSIPYNVFKDIFYLFQNFDLLNQIFHKYVTENNLNEQDIREQIVTKNDFMTVLNAQYNKVNNIIEFSPSQINLLFSIVANSKENRRLRKRNQDRDDELLNDHHYDSDIDFFIHNEYLHGVSRSRKNLESFNDYYHDLSDGFDQDSGVKKASKASTGLFESVFGGKKDKATMRSDLTIEDFMKILNPNYLNDLVHQMELQKNQNESLYINYYFYPIFDSLYNFSLGSIAGCIGATVVYPIDFIKTRMQAQRSLAQYKNSIDCLLKIISREGIKGLYSGLGPQLIGVAPEKAIKLTVNDFMRNRLTDKNGKLSLFPEIISGASAGACQVIFTNPLEIVKIRLQVQSDYVGENIQQANETATQIVKKLGLRGLYNGVAACLMRDVPFSAIYFPTYAHLKKDLFDFDPNDKTKRNRLKTWELLTAGAIAGMPAAFLTTPFDVIKTRLQIDPRKGETKYNGIFHAIRTILKEESFRSFFKGGGARVLRSSPQFGFTLAAYELFKGFIPSPDNKLKSREGRKRFCIDDDAGNEETVVHSNGELPQQKFYSDDRKHANYYYKSCQIAKTFIDLDNNFSRFDSSVYKNFQEHLRSING

SEQ ID NO: 135 - protein, 310 aa, Saccharomyces cerevisiae
MTSIDNRPLPFIYQFTAGAIAGVSELLVMYPLDVVKTRMQLQVTTKGHPAVVAAKAAVDHYTGVMDCLTKIVKKEGFSHLYKGITSPILMEAPKRAIKFSGNDTFQTFYKKIFPTPNGEMTQKIAIYSGASAGAVEAFVVAPFELVKIRLQDVNSQFKTPIEVVKNSVVKGGVLSLFNGLEATIWRHVLWNAGYFGIIFQIRKLLPAAKTSTEKTRNDLIAGAIGGTVGCLLNTPFDVVKSRIQRSSGPLRKYNWSLPSVLLVYREEGFKALYKGFAPKVMRLAPGGGLLLVVFTNVMDFFREVKYGKKQ

SEQ ID NO: 136 - protein, 307 aa, Saccharomyces cerevisiae
MSSDSNAKPLPFIYQFISGAVAGISELTVMYPLDVVKTRFQLEVTTPTAAAVGKQVERYNGVIDCLKKIVKKEGFSRLYRGISSPMLMEAPKRATKFACNDQYQKIFKNLFNTNETTQKISIAAGASAGMTEAAVIVPFELIKIRMQDVKSSYLGPMDCLKKTIKNEGIMGLYKGIESTMWRNALWNGGYFGVIYQVRNSMPVAKTKGQKTRNDLIAGAIGGTVGTMLNTPFDVVKSRIQSVDAVSSAVKKYNWCLPSLLVIYREEGFRALYKGFVPKVCRLAPGGSLMLVVFTGMMNFFRDLKYGH

SEQ ID NO: 137 - protein, 292 aa, Saccharomyces cerevisiae
MEDSKKKGLIEGAILDIINGSIAGACGKVIEFPFDTVKVRLQTQASNVFPTTWSCIKFTYQNEGIARGFFQGIASPLVGACLENATLFVSYNQCSKFLEKHTNVSPLGQILISGGVAGSCASLVLTPVELVKCKLQVANLQVASAKTKHTKVLPTIKAIITERGLAGLWQGQSGTFIRESFGGVAWFATYEIVKKSLKDRHSLDDPKRDESKIWELLISGGSAGLAFNASIFPADTVKSVMQTEHISLTNAVKKIFGKFGLKGFYRGLGITLFRAVPANAAVFYIFETLSAL

SEQ ID NO: 138 - protein, 299 aa, Saccharomyces cerevisiae
MSSKATKSDVDPLHSFLAGSLAGAAEACITYPFEFAKTRLQLIDKASKASRNPLVLIYKTAKTQGIGSIYVGCPAFIIGNTAKAGIRFLGFDTIKDMLRDSETGELSGTRGVIAGLGAGLLESVAAVTPFEAIKTALIDDKQSATPKYHNNGRGVVRNYSSLVRDKGFSGLYRGVLPVSMRQAANQAVRLGCYNKIKTLIQDYTDSPKDKPLSSGLTFLVGAFSGIVTVYSTMPLDTVKTRMQSLDSTKYSSTMNCFATIFKEEGLKTFWKGATPRLGRLVLSGGIVFTIYEKVLVMLA

SEQ ID NO: 139 - protein, 324 aa, Saccharomyces cerevisiae
MSSDNSKQDKQIEKTAAQKISKFGSFVAGGLAACIAVTVTNPIELIKIRMQLQGEMSASAAKVYKNPIQGMAVIFKNEGIKGLQKGLNAAYIYQIGLNGSRLGFYEPIRSSLNQLFFPDQEPHKVQSVGVNVFSGAASGIIGAVIGSPLFLVKTRLQSYSEFIKIGEQTHYTGVWNGLVTIFKTEGVKGLFRGIDAAILRTGAGSSVQLPIYNTAKNILVKNDLMKDGPALHLTASTISGLGVAVVMNPWDVILTRIYNQKGDLYKGPIDCLVKTVRIEGVTALYKGFAAQVFRIAPHTIMCLTFMEQTMKLVYSIESRVLGHN

SEQ ID NO: 140 - protein, 459 aa, Saccharomyces cerevisiae
MPSNVRSGVLTLLHTACGAGVLAMPFAFKPFGLMPGLITLTFCGICSLCGLLLQTRIAKYVPKSENASFAKLTQLINPSISVVFDFAIAVKCFGVGVSYLIIVGDLVPQIVQSIFYRNDDNMSGSQEHHMFLDRRLYITLIIVFVISPLCFKRSLNSLRYASMIAIVSVAYLSGLIIYHFVNRHQLERGQVYFMVPHGDSQSHSPLTTLPIFVFAYTCHHNMFSVINEQVDKSFKVIRRIPIFAIVLAYFLYIIIGGTGYMTFGENIVGNILTLYPNSISTTIGRLAMLLLVMLAFPLQCHPCRSSVKNIIIFIENFRKGKLYDNRASFIPLDNFNSEDPQEAPTQQNNEEPNLRSESLRHINIITLCILLFSYLLAISITSLAKVLAIVGATGSTSISFILPGLFGYKLIGSEFTGTNERVPTSIKIFKYLSLSLFIWGIAVMVASLSAIVFLGTSSH

SEQ ID NO: 141 - protein, 357 aa, Saccharomyces cerevisiae
MTRDSPDSNDSYKHINKNTTQKTSFDRNSFDYIVRSGLAGGISGSCAKTLIAPLDRIKILFQTSNPHYTKYTGSLIGLVEAAKHIWINDGVRGFFQGHSATLLRIFPYAAVKFVAYEQIRNTLIPSKEFESHWRRLVSGSLAGLCSVFITYPLDLVRVRLAYETEHKRVKLGRIIKKIYKEPASATLIKNDYIPNWFCHWCNFYRGYVPTVLGMIPYAGVSFFAHDLLHDVLKSPFFAPYSVLELSEDDELERVQKKQRRPLRTWAELISGGLAGMASQTAAYPFEIIRRRLQVSALSPKTMYDHKFQSISEIAHIIFKERGVRGFFVGLSIGYIKVTPMVACSFFVYERMKWNFGI

SEQ ID NO: 142 - protein, 307 aa, Saccharomyces cerevisiae
MSEEFPSPQLIDDLEEHPQHDNARVVKDLLAGTAGGIAQVLVGQPFDTTKVRLQTSSTPTTAMEVVRKLLANEGPRGFYKGTLTPLIGVGACVSLQFGVNEAMKRFFHHRNADMSSTLSLPQYYACGVTGGIVNSFLASPIEHVRIRLQTQTGSGTNAEFKGPLECIKKLRHNKALLRGLTPTILREGHGCGTYFLVYEALIANQMNKRRGLERKDIPAWKLCIFGALSGTALWLMVYPLDVIKSVMQTDNLQKPKFGNSISSVAKTLYANGGIGAFFKGFGPTMLRAAPANGATFATFELAMRLLG

SEQ ID NO: 143 - protein, 329 aa, Saccharomyces cerevisiae
MSEEFPTPQLLDELEDQQKVTTPNEKRELSSNRVLKDIFAGTIGGIAQVLVGQPFDTTKVRLQTATTRTTTLEVLRNLVKNEGVFAFYKGALTPLLGVGICVSVQFGVNEAMKRFFQNYNASKNPNMSSQDVDLSRSNTLPLSQYYVCGLTGGVVNSFLASPIEQIRIRLQTQTSNGGDREFKGPWDCIKKLKAQGGLMRGLFPTMIRAGHGLGTYFLVYEALVAREIGTGLTRNEIPPWKLCLFGAFSGTMLWLTVYPLDVVKSIIQNDDLRKPKYKNSISYVAKTIYAKEGIRAFFKGFGPTMVRSAPVNGATFLTFELVMRFLGEE

SEQ ID NO: 144 - protein, 284 aa, Saccharomyces cerevisiae
MNTFFLSLLSGAAAGTSTDLVFFPIDTIKTRLQAKGGFFANGGYKGIYRGLGSAVVASAPGASLFFISYDYMKVKSRPYISKLYSQGSEQLIDTTTHMLSSSIGEICACLVRVPAEVVKQRTQVHSTNSSWQTLQSILRNDNKEGLRKNLYRGWSTTIMREIPFTCIQFPLYEYLKKTWAKANGQSQVEPWKGAICGSIAGGIAAATTTPLDFLKTRLMLNKTTASLGSVIIRIYREEGPAVFFSGVGPRTMWISAGGAIFLGMYETVHSLLSKSFPTAGEMRA

SEQ ID NO: 145 - protein, 602 aa, Saccharomyces cerevisiae
MPEQEPLSPNGRKRSEVHYISIPLNRGSAFSPDDSVSQFQSDGFMTRRQSILDHPVGSFKGVNSLSRFATSLRRANSFRNIELNADNERSFFKESNDETYDPDTLAPALDGRRLSVTLNNAGRPRITNLANNDRVSTASMAIHDDDYGSIQNSTIGDSGSILRPTASLTEMMSGGAGRRFTNNDMDSIVVKRVEGVDGKVVTLLAGQSTAPQTIFNSINVLIGIGLLALPLGLKYAGWVIGLTMLAIFALATFCTAELLSRCLDTDPTLISYADLGYAAFGTKGRALISALFTLDLLGSGVSLVILFGDSLNALFPQYSTTFFKIVSFFIVTPPVFIPLSVLSNISLLGILSTTGTVLVICCCGLYKSSSPGSLVNPMETSMWPIDLKHLCLSIGLLSACWGGHAVFPNLKTDMRHPDKFKDCLKTTYKITSVTDIGTAVIGFLMFGNLVKDEITKNVLLTEGYPKFVYGLISALMTIIPIAKTPLNARPIVSVLDVLMNVQHIDEAASAIKRRAAKGLQVFNRIFINVVFVLIAINFPEFDKIIAFLGAGLCFTICLILPCWFYLRLCKTTIKPWERVACHVTICISVVLSTLGVGAAIIS

SEQ ID NO: 146 - protein, 480 aa, Saccharomyces cerevisiae
MSELGEYSKLENKELRTEFELTNFPFPGTTDNDSDDGSQGQNSLNIITPDMDDTLVNDVLRENDKKSSMRMAFMNLANSILGAGIITQPFAIKNAGILGGLLSYVALGFIVDWTLRLIVINLTLAGKRTYQGTVEHVMGKKGKLLILFTNGLFAFGGCIGYCIIIGDTIPHVLRAIFSQNDGNVHFWLRRNVIIVMVTTFISFPLSMKRNIEALSKASFLAVISMIIIVLTVVIRGPMLPYDWKGHSLKLSDFFMKATIFRSLSVISFALVCHHNTSFIFFSMRNRSVAKFTRLTHISIIISVICCALMGYSGFAVFKEKTKGNVLNSFPGTDTAINIARLCFGFNMLTTFPMEIFVLRDVVGNLLHECNLIKNYDEHTQLSGKQHVVITSSLVFITMGISLTTCNLGALFELIGATTASTMAYILPPYTNLLLTSKKKSWKERLPFYLCICFGFMIMIISSTQTIIDAVNGSDGQHCQI

SEQ ID NO: 147 - protein, 692 aa, Saccharomyces cerevisiae
MNGKEVSSGSGRTQSNNNKKNNNGGSTGISHASGSPLTDGNGGNSNGNSRSRSRSRKSSGTTGGLLKKPPLLVNNEAVHASVPDASHTSCNNGTLEVSINNPEPHVVDAVARHLIRNPSNSLQLQGGDITRDLYKWTNDHPSSPSQYQYPSQPALSTSIPSQAPSFSNRKRSMSFSAASIASSSHLNNNSEANGNPLAAIGLAPAPMTHEEIRAPGGFRRSFIIQKRRKHNVDAPIPNFFTRNFIEFLTLYGHFAGEDLSEEEEEEEETEEEPEEEALETESTQLVSREHGRHPHKSSTVKAVLLLLKSFVGTGVLFLPKAFHNGGWGFSALCLLSCALISYGCFVSLITTKDKVGVDGYGDMGRILYGPKMKFAILSSIALSQIGFSAAYTVFTATNLQVFSENFFHLKPGSISLATYIFAQVLIFVPLSLTRNIAKLSGTALIADLFILLGLVYVYVYSIYYIAVNGVASDTMLMFNKADWSLFIGTAIFTFEGIGLLIPIQESMKHPKHFRPSLSAVMCIVAVIFISCGLLCYAAFGSDVKTVVLLNFPQDTSYTLTVQLLYALAILLSTPLQLFPAIRILENWTFPSNASGKYNPKVKWLKNYFRCAIVVLTSILAWVGANDLDKFVSLVGSFACIPLIYIYPPLLHYKASILSGTSRARLLLDLIVIVFGVAVMAYTSWQTIKMWSQ

SEQ ID NO: 148 - protein, 713 aa, Saccharomyces cerevisiae
MVTNNGDGEHLGIRRNGNLRHPSNNMKIPRRAQSTVLNSNPFYSRKYSMSTLTPRDICRSVDSRVFVDMSSPNFQTLEDPHRDEIINSVRLNYLNSSKRSSVSHGNEAIPRVNPTKNSSASTIAAANVDSDDDETNLSSAGGDITHDIYKLVKAEDPKRLRRPRSMENVTPKIEHHTKLSSASGLNVPGGFRREFIVNKKRQEHQLNDSASSDFTSHESDSINQSSPSSNQDIDKVPFLTRNFLEFLYVFGHFAGESFEDDFIPDSSNMMIRGEDERSALLSRPDHMKVLPSAKGTTSTKKVFLILLKSFIGTGVLFLPNAFHNGGLFFSVSMLAFFGIYSYWCYYILVQAKSSCGVSSFGDIGLKLYGPWMRIIILFSLVITQVGFSGAYMIFTAKNLQAFLDNVFHVGVLPLSYLMVFQTIIFIPLSFIRNISKLSLPSLLANFFIMAGLVIVIIFTAKRLFFDLMGTPAMGVVYGLNADRWTLFIGTAIFAFEGIGLIIPVQDSMRNPEKFPLVLALVILTATILFISIATLGYLAYGSNVQTVILLNLPQSNIFVNLIQLFYSIAIMLSTPLQLFPAIKIIENKFFPKFTKIYVKHDDLTTRVELRPNSGKLNWKIKWLKNFIRSIIVIIVVSIAYFGSDNLDKFVSVIGSLACIPLVYIYPSMLHLRGNSLPETKGEFWRFKPMLDTILIFFGIASMLYTSYQSIFGV

SEQ ID NO: 149 - protein, 459 aa, Saccharomyces cerevisiae; identical to SEQ ID NO: 140

SEQ ID NO: 150 - protein, 448 aa, Saccharomyces cerevisiae
MVASIRSGVLTLLHTACGAGILAMPYAFKPFGLIPGVIMIVLCGACAMQSLFIQARVAKYVPQGRASFSALTRLINPNLGIVFDLAIAIKCFGVGVSYMIVVGDLMPQIMSVWTRNAWLLNRNVQISLIMLFFVAPLSFLKKLNSLRYASMVAISSVAYLCVLVLLHYVAPSDEILRLKGRISYLLPPQSHDLNVLNTLPIFVFAYTCHHNMFSIINEQRSSRFEHVMKIPLIAISLALILYIAIGCAGYLTFGDNIIGNIIMLYPQAVSSTIGRIAIVLLVMLAFPLQCHPARASIHQILQHFAEENVSISATSADEPTVATESSPLIRDSSLDLNEVIEEESIYQPKETPLRGKSFIVITCSILVASYLVAISVSSLARVLAIVGATGSTSISFILPGLFGYKLIGTEHKTAVPLTTKIFKYTGLLLFIWGLIIMITCLTAALKLN

SEQ ID NO: 151 - protein, 490 aa, Saccharomyces cerevisiae
MEATSSALSSTANLVKTIVGAGTLAIPYSFKSDGVLVGVILTLLAAVTSGLGLFVLSKCSKTLINPRNSSFFTLCMLTYPTLAPIFDLAMIVQCFGVGLSYLVLIGDLFPGLFGGERNYWIIASAVIIIPLCLVKKLDQLKYSSILGLFALAYISILVFSHFVFELGKGELTNILRNDICWWKIHDFKGLLSTFSIIIFAFTGSMNLFPMINELKDNSMENITFVINNSISLSTALFLIVGLSGYLTFGNETLGNLMLNYDPNSIWIVIGKFCLGSMLILSFPLLFHPLRIAVNNVIIWIEITYGGANPEEDPQVSEYTRASNLRPISMTVEDPAQPSDALDATSYNEQECLLPNGNFDNGSIESQENNNDERGTMAVAGDNEHHAPFVKSRFYWITALLLISMYTLALSVQSFALVLSFVGATGSTSISFTLPGLLGYKLIGLDSLAIGKMIPPKDRFYKRCSLLLVFYGLSVMFLSLYVTVFNRSDEA

SEQ ID NO: 152 - protein, 562 aa, Saccharomyces cerevisiae
MQTLDETSNLLPPPEEAEAPPLEQKFHEYNLALPKFPILFSLWLGSFLSSLDSTIVANIMNRVAEEFSESSKKQWIATSFLLTNTAFQPLYGKLSDITGRKSALLTAQFFFGLGCLLTCFARNVTEFSIARAICGIGAGGLNAISSIAVSDICTARERGVYQGYANIVFGFGQLLGAPLGGVFIETIGWRALFGIQVPVIMLCSVLAIKNINIKLFHVPPMKERYTLKNLSRIDIFGSLSLVATISGVLFLCSSQLNKLYLALFTIGSFIVFILVERYYATEKILPFELLTRSFCLSSAVTVISSFVVFGEIFRSPIYLQLLQNISVTKTGLFLIFPSISVAVGSLVTGWVLRNTKINLAHCAYQIIFGGMIMQLLGLGLGYFLLSHLNPDYTIYDMLESITFRSNSIWWKLIYVFASVLVSFGYACLLVATLVSIVFTVEKSQQGTMTGVFYLWRSIGNVLGASLTLVSYENSLSSMLWNYMFKTKRDDEYHFTKKQYYSLINDSSYLRGPNFPTDIFVRILDVYKKAFLISYIPNIALAAVGIVLSLYLVKHTYKRSSSS

SEQ ID NO: 153 - protein, 474 aa, Saccharomyces cerevisiae
MSISNWITTAYLITSTSFQPLYGSFSDALGRRNCLFFANGAFTIGCLACGFSKNIYMLSFMRALTGIGGGGLITLSTIVNSDVIPSSKRGIFQAFQNLLLGFGAICGASFGGTIASSIGWRWCFLIQVPISVISSILMNYYVPNQKEYNRQNSSIFQNPGKILRDIDVMGSILIITGLTLQLLYLSLGCSTSKLSWTSPSVLLLLVGSVIILLLFILHERKTSARAIIPMELVNSSYSVVVLSISILVGFASYAYLFTLPLFFQIVLGDSTAKAGLRLTIPSLFTPVGSLITGFSMSKYNCLRLLLYIGISLMFLGNFLFLFIEKTSPNWLIGLFLIPANLGQGITFPTTLFTFIFMFSKSDQATATSTLYLFRSIGSVWGVAISAGVIQLSFAGLLRSNLKGLLDENKIKKLIVQLSANSSYIGSLHGEVKNTVIKSFDEATKRAHLMSTLLSSLALILCILKDNLAKPKTRR

SEQ ID NO: 154 - protein, 458 aa, Saccharomyces cerevisiae
MNMLIVGRVVASVGGSGLQTLCFVIGCTMVGERSRPLVISILSCAFAVAAIVGPIIGGAFTTHVTWRWCFYINLPIGGLAIIMFLLTYKAENKGILQQIKDAIGTISSFTFSKFRHQVNFKRLMNGIIFKFDFFGFALCSAGLVLFLLGLTFGGNKYSWNSGQVIAYLVLGVLLFIFSLVYDFFLFDKFNPEPDNISYRPLLLRRLVAKPAIIIINMVTFLLCTGYNGQMIYSVQFFQLIFASSAWKAGLHLIPIVITNVIAAIASGVITKKLGLVKPLLIFGGVLGVIGAGLMTLMTNTSTKSTQIGVLLLPGFSLGFALQASLMSAQLQITKDRPEAAMDFIEVTAFNTFMKSLGTTLGGVLSTTVFSASFHNKVSRAHLEPYEGKTVDDMILYRLQNYDGSHSTIGNILSDSIKNVFWMDLGFYALGFLFCSFSSNKKLIIPKKDETPEDNLEDK

SEQ ID NO: 155 - protein, 768 aa, Saccharomyces cerevisiae
MGKKDRQRKKLREFAKLKNRQRNLRKSVQTLKNEVQREAKVPRTSNQIALGNDKIEEINENSPLLSAPSKQEEVSIPKAVDIDTIDAQPLHEGPKIDDSPQDEVNSIKGKPADKANEDDLKPPSQHEACGNSALQSSITDFSDRSVSPLQSITSCNTPMSEHELPVSSSNSFERADDMPVVQADNQTSSSKSLHIVAPSPEVPVSGDEITSYGYGSIPQSIGDVENGLNPPYVENTSSDELVHDLTRRRIFSSCMCTYLFFIAMDSSIILVIASKIASEFHELWRLSLVISAYLLSNAIGQLVFLKLSLISSVKLLLCIAQFSFILGGYLSWSSAHFWTFIFARCVTGFGGGSLIALKSTIMNRFSQKNDSRYSLSASMITFAMGVVIGPFMMNLFDSSHGSGWRNAFLIPVPFCLVNASIMLADMYSVKSTLYGRPTPTLWKRFKNTLLSPDLYEILTLTLFLLCFVQVTSLDLTGLKNNTMIQALLFSVIIVCGILFFLIETSDTYMNSVISMSLQGDKRLIWTMIGISFCFAALMCIIPFGTTYFIIVLNLSTLQLAERLSPFFFSIVLGYFSVSYFWKSKGQNFLLKFVLSGATLLLYVALMGVSLNLPVWKQYICLSLPFLGSSMILTLLSNLYHEYHEQRKSPISGSIVYCFGAVGGTVGISLGGYVFHKTLIKLMHEKVMPFSKQGYLKKDLLKIIKHATESSDWVHESAPKFVFQTLIECYLQACRNVFKLSTLFFTITVVAIFIFNRIHCRSQNCLSLS

SEQ ID NO: 156 - protein, 582 aa, Saccharomyces cerevisiae
MEETKYSSQQEIEGACGSDASLNARGSNDSPMGLSLYLCLASLTLVLFITALDILIVGTIIDVVAEQFGNYSKTGWLVTGYSLPNAILSLIWGRFASIIGFQHSLILAILIFEAGSLIAALASSMNMLIFGRVVAGVGGSGLQTLCFVIGCTMVGERSRPLVISILSCAFAVAAIVGPIIGGAFTTHVTWRWCFYINLPIGGLAIIMFLLTYKAENKGILQQIKDAIGTISSFTFSKFRHQVNFKRLMNGIIFKFDFFGFALCSAGLVLFLLGLTFGGNKYSWNSGQVITYLVLGVLLFIFSLVYDFFLFDKFNPEPDNISYRPLLLRRLVAKPAIIIVNMVTFLLCTGYNGQMIYSVQFFQLIFASSAWKAGLHLIPIVITNVIAAIASGVITKKLGLVKPLLIFGGVLGVIGAGLMTLMTNTSTKSTQIGVLLLPGFSLGFALQASLMSAQLQITKDRPEAAMDFIEVTAFNTFMKSLGTTLGGVLSTTVFSASFHNKVSRAHLEPYEGKTVDDMILYRLQNYDGSHSTIGNILSDSIKNVFWMDLGFYALGFLFCSFSSNKKLIIPKKDDTPEDNLEDK

SEQ ID NO: 157 - protein, 528 aa, Saccharomyces cerevisiae
MSYGTINDMNESVTNYRIKKAQNNIKGWYAYSFSSEPFVVSAVSTYIPLLLQQFASINGVKVHDHSIPCLSETGSDSDKCVLGLFNNRIFVDTSSFALYVFSLSVLFQTIIVISVSGIVDLWGSVKFKGRILVWFGIVGALSTVAISKLNDTQIYSLAGLYIVANGCFGVINVVGNSLLPIFVKDSLKCQSQGAYEPDKVDSLTTVISGRGASLGYSSALIVQIVSMFLVASKKGSKQDVQVAVLFVGIWWFVWQLPMIWLIDDVTIPIRVDDSTLASARSPYPGEQDALGQLNWKNYLSYGWVSLFESFKHARLLKDVMIFLIAWFIISDSITTINSTAVLFSKAELHMSTLNLIMISVLTVVNAMLGAFMIPQFLATKFRWTSSQTLMYIIIWASFIPFYGILGFFFNAFGLKHKFEMFLLAIWYGLSLGGLSAVSRSVFSLIVPPGKESTFFSMFSITDKGSSILGPFLVGLLTDKTHNIRYSFYFFFLLLMLSLPVLNCLDVKRGRREAEELSQVLPESERRLD

SEQ ID NO: 158 - protein, 590 aa, Saccharomyces cerevisiae; identical to SEQ ID NO: 96

SEQ ID NO: 159 - protein, 611 aa, Saccharomyces cerevisiae; identical to SEQ ID NO: 98

SEQ ID NO: 160 - protein, 296 aa, Saccharomyces cerevisiae
MKLIPIILNAKNLSGMAGSISICCWIVVFVPQIYENFRRQSAEGLSLLFIVLWLLGDIFNVMGAMMQNLLPTMIILAAYYTLADLILLIQCMWYDKEKKSILQEVKKNVDPVHLPPANPINETVLQDVFNEYEPLLPRIEEEDSQSYSSLELGRTIVVKERENFFNDFLIVSGVLIAGILSWYISYCSGLDNGIPKKKPAFEQINLPAQILGYLSAILYLGSRIPQIVLNFKRKSCEGVSFLFFLFACLGNTSFIISVLSASWLIGSAGTLLMDFTVFIQFFLYAKPKYEKILIDN

SEQ ID NO: 161 - protein, 725 aa, Saccharomyces cerevisiae
MPQSTPSQEVQRVPWDNKPALKQITLRATIAGIAIGSLVLTSNFQFGLQTGWVSMMSLPSALLACAFFKNIWPLIFPNDRPFSDVENVYVQSMAVAVGTGPLAFGFVGVIPAIEKFLTNDESGGLREQGQSFTFRELLIWSTALAFFGIFFAVPLRKQVIVREKLPFPSGSATATLISVLNGTEILQEVSKSELLEMRQRRLNECPEVLQPNRDPEEADYLMNSSHSELGDYTATSQDGSSILSTGSENYRANIIILLKTFVVSSLYTMVSYFVPVIRSIPVFGKYLSNNYLWNFQPSPAYIGQGIIMGLPTVSYMLIGCFLGWGVLAPLARYKRWVPPDADVHDWEEGVQGWILWSSLSIMVADSVVAFIVVTVKSIVKFILIDDKAALLNNIIDDTFQSMLLEEERAINSSRRNTYVDGRQDTVRLVSRDNEIEVDSKHLVRYTTVISGCLVSSIICIVSIIYLFGIQVIPLYAIITALILALFLSILGIRALGETDLNPVSGIGKISQLIFAFIIPRDRPGSVLMNVVSGGIAEASAQQAGDLMQDLKTGHLLGASPRAQFCAQLIGACWSIILSSFMYLCYNKVYSIPSEQFRIPTAVVWIDCARLVTGKGLPDKALECSMILGVIFAVLSLIRNTYRDYGYGWILYIPSGVAVGVGIFNSPSFTIARFIGGWASHFWLKNHRGDLNAKTKMIVFSSGLVLGEGIFSVINMLFICLNVPHY

SEQ ID NO: 162 - protein, 735 aa, Saccharomyces cerevisiae; identical to SEQ ID NO: 127

SEQ ID NO: 163 - protein, 584 aa, Torulaspora microellipsoides
MSKLIPIASPALSMMTSRAYDEVKNENVEKGEQGSVDEKGEYVDVLGREIISSETEKHGNLPLQAYVHYAGIQREFERERDEDGLYAVQREQMYTDPHSNVSPSKLDSQRMLRIAKAYSVFFLITTDILGPSNAPYAVAQMGWVPGVILYVIFGVAAAFGGWLLNFCFCKVDSNNYPIRTFSDLAARVVAPWFRYPFGLLQFIQMILNCGLLLLSTAQSVSQMLVVNRGGDHFCFTVDILVWGLLCMIMGQIRSLGRFAHIANSAVWMNIAICIITMVGVALGGPYYGIFEQYGQGAPYFQPSSYIPLPIKQYAIVPGNISDKIAGMNNMVFAWGGATIFCEVMAEMRRPMDFWKGMLCAQSLILVVYLFYGLFVYAYNGQFSYVTANMAIGSIGLQNAGNVLTIITGIIAMVLYGNIGIKVIYQGFLVTDFNFPSLTSRKGTFAWAGFVVVYWAIAYILGTAIPSISALVAIVGAFCILNFSYTFPFLFGFCLLCRQDAALADNFDAKTLTVEKADSYRSWSRWKRALGYGGTYRILIKVSLFLLFLASLATCGLCSYSAISGAIAVYQTNPAQPFTCTSPVA

SEQ ID NO: 164 - protein, 583 aa, Torulaspora microellipsoides
MSKLVPIASPNLSMMTSRAYDEAKKEKGSQGTIDHEKGEYVDISGREIISSESEKHGRQLPLQAYVHYAEIQREFERERDEDGLYAVQREQMYTDPHSNVSPSKLDSQRMLRIAKAYSVFFLITTDILGPSNAPYAVAQMGWVPGVILYVLFGVAAAFGGWLLNFCFCKVDSNNYPIRTFSDLAARVVAPWFRYPFGLLQFIQMILNCGLILLSTAQSVSQMLVVNRGGDDFCFTVDILVWGLLCMILGQIRSLGRFAHIANSAVWMNIAICIITMVGVAVGGPYYGIFEQYGQGAPYFQPSSYIPLPIKQYAIVPGNISDKIAGMNNMVFAWGGATIFCEVMAEMRRPMDFWKGMLCAQSLILVVYLFYGLFVYAYNGQFSYVTANMAIGSIGLQNAGNVLSIISGIIAMVLYGNIGIKVVYQGFLVTDFNFPSLTSRKGTFAWGGFVILYWAVAYILGTAIPSISALVGIVGAFCILNFSYTFPFLFGFCLLCRQDAALADNFDAKTLTVEKADSYREWSRWKRALGYGGIYRTSIKVSLFLLFLASLATCGLCSYSAISGAIAVYQTNPAQPFTCTSPVA

SEQ ID NO: 165 - protein, 905 aa, Candida albicans
MDEKNPTTELSVPNIEAVGSHLQVQDHEINLQAIISNPLSIGEVATTLTESQKWFVLKRLHFDALVSLDELPPQASFIFEKIEQMTTEEAVEILEKNIEEHETDVNIPENDLVLWKELVENSHKFTKVQLQEKLGSNSSSSVEGEKTADVEKGHEIVDWDLQVRLEAVLVAYWSPYPEVRAVTFPYDDPTIPAETFRVYLIAIIWTAIGAVINQFFVERQPAITLAMSVVQVFLYPSGLLCEWILPKWKFKIWKLSIDLNPGPYTYKEQMLATIFCGVTGGGTSYVSSNILMQKSEIFYDNKWVDFGYQVLLILSTNFLGIGLAGIMRKFAVYPTKAVWPSILPGLALNKTLLTPAKKEVINGWKISGYNFFFIAFVASFLYFWVPDYLFQALSTFNWMTWIKPDNQNLAVVTGSVGGLGLNPITTFDWNYFSSMLQPLQVPFFYPVNNIIGMAIAFFCIIGVWYSNYKWTGYLPINDNGLYTNTGEPYSVRSVVDANSLFDQAKYAEMGPPFYTAANLVVYGAFFAIYPFHFVYELGMNYDQMWDAFKSFWRVIKDYKKSTYDGFDDPHSTMMRAYPEVPEWAYLIIVVISLVLAILCVKVYPAETPVWGIFFALGINFVFLIPLTTIYARTGFAFGLNVLVELIVGYAIPGNGLALAFIKALGYNIDGQAQNFVNDLKQGHYAKLPPRAVYRVQLLSIFISSFIQLGILNFQINGGIKDYCEPGNTQKFTCPSSRTFYSASVLWGVIGPKRVFNGLYPILRWCFLIGFLIAFPCIAIKKWGPRKYVKYFEPSIIIGGFLNYAPYNLSYYIPGLYVSFTFMSYIKRKYEAWWQKYTYVLSTGLNAGIAFSSIIIFFAVMYHEKDINWWGNTVMYSGVDYAMTGWLNATVDAPDGYFGPRVGHFP

SEQ ID NO: 166 - protein, 366 aa, Candida albicans
MNYDQMWDACTSFWRVIKDFRKSTYDGFDDPHSTMMRAYPEVPEWAYLIIVVISLVLAILCVKLYPAQTPVWGIFFALGINFVFLIPLTTIYARTGFAFGLNVLVELIVGYAIPGNGLALAFIKALGYNIDAQAQNFVNDLKQGHYAKLPPRAVYRVQLLSIFVSSFIQLGILNFQINGIKDYCKPGNTQKFTCPGGRTFFSASVLWGVIGPKKVFNGLYPVLAWCFLIGFLLAFPCIAIKKYAPRKYVKYFEPSIVIGGFLKYAPYNLSYYIPGVYVSYAFMSYIKRKYEAWWQKYTYVLSTGLNAGIAFSSIIIFFAVMYHEKDINWWGNTVMYSGVDYAMTGWLNATVDAPDGYFGPRRGNFP

SEQ ID NO: 167 - protein, 921 aa, Candida albicans
MSTEKPIPALPVTSITSHVDVAAHEVNLQAITSNPLSIGEVGTTLTNGQKDFILKRLHYDSLVSFDKLPPQATFIFEKIEHISIEEALAILEKAVVEHENDVNILDNDEELWTKLINYKQGKIPSDTDFSEKAHPSNFTAKDKLSAFIHEKRVSEETSSLDNSASENLNEPYYKIVDWELQVKLEAVLIAYWSPYPQVRGVTDPYDDPTIPVETVRVYIVAIIWTAIGAVINQFFSERQPSIGLGMSVVQVFLYPTGLICEWILPKWKFKVWKYTIDLNPGPYTFKEQMLATIFCGVSSGTSYVSSNILMQKSELFYDNKWVDFGYQVLLTLSTNFLGFGLSGIMRQFAVYPEKAIWPSILPNVRLNKTLMSPEVKARINGWSISGYNFFFITAGISFLYFWIPDYLFQALSQFNWMTWIKPDNYNLAVVTGSFGGLGLNPIPSFDMNVIGTGGFIAPFYNTLESYIGMVLALFCILGVFYSNYKWTGFLPINSNRLFTNEGKPYHVTAVVNSNSLFDEEKYKEVGPPFYSAGNLVLYGAFFAIYPFHFVYEIAMNYKQMWEALQSLYKGIRNFKRSTYEGFDDPHSVMMRAYPEVPEWAYLIILVISLVLAILCVKLYPAETPVWGIFFALAINFVFLIPLTTVQSRTMFGFGLNVLVELIVGYAIPGNGLALAFIKALGYNIDGQAQNFINDLKQGHYAKLPPRAMYRCQLLSVFITSFIQLGILNYQITGIKDYCVPGNKQKFTCPGTTTFYNASVLWGVIGPKKVFNGLYPILAWCFLIGFLLAFPCIAFKKWAPRKYSKYFEPSIIIGGFLGYAPYNLSYNTGGLYVGYAFMHYVKRKYEAWWQKYDYLLATGIDAGIAFSSIIIFFAVMYHEKDISWWGNNVPFEGWDASMTNGYLNATLQAPDGYFGPRVGHFP

SEQ ID NO: 168 - protein, 945 aa, Candida albicans
MTKKGHEYIQLSTFSEHENEHEPESSSTTSSPPPPGIRQYEKQHEWNFTDLQLQFVLLRLGVISDEVYHNQNFSLSDPDIHISKEVEYMINKIDQLSISEAIEIIRDALADHNGDVNFLIEDYQLLERLISQIPNNIESQENNQNVETNLDELPEMKYPMQSTFKNKTYLTIIDWSLQIRLEAALIHYHSPYPEIRAITDPFDDPNTPVETFRAYFIALFWTFIGSLINSFFYHRMPGISLGTHTIQILLLPSGKLWEKLIPLNKTITINNTKINLNPGPWNFKEMMLSTIIYSCSASTPYSINNIFVMKLDRFYGLKWVNWIFQILFTVSTQLLGFSFAMIMKKVCVYPSKAIWPTILPTIALNRALMNQDNASNNSIVHGWKISPYSFFLVTFTLSFIYNWIPSYFFKALSLFNWPTWFNPNSIHLVNITGSNVGLGFNPIPSFDWNVIGGSSMVIPFYTFVNRYLGTFLGFIIILIVYYTNNNWTAYLPINSNRLFNNKAQLYNVHDILNDDNKLFDNEKYQQIGPPYFSAANLVIYGAYFCLYPFAILYHGLTEWNSMKTSFINVWTSIVDAFKSESEMGVSVESNDDNNLSLHRQYGRYANDPHCKMMAHYPDVPDWWFITILVVSTSFAIAAVWFYPVETPIWGIFFTIAINFIFLIPLTSIASVTGFSFGLNVLVELIVGYAIPNSGIALITLKAYGYNIDSQASNYITDQKLAHYAKIPPRAIFKGQLLSTLLNIIISLSVANWQLNNVENICDPHQKDNFKCPGANTYFYSSIQYGEIGPAKVFGGLYPILKWCFLLGVLLVFPCVWLKRNGPTKIFQRYFQPTIIIGGMLDFAPYNLSYFTGGLYISYIFMFYIKKNYLLWWEKYNYILTSALSAGVAFSALIIFFTVQYHPHPLHWWGNSIGQQGIEGGEISPIWKNIDTAPDGYIGLRKGHFP

SEQ ID NO: 169 - protein, 747 aa, Candida albicans
MSKEAEFVKTISKEGDPQVDVLERDAESNSENALEPDVEELPKVVREIVPLEDDPTIPVLTFRYFILSIIFIIPGAFIDTMNSFRTTSAAYSIFFVQIASHWCGKWLARILPKKQVGFGRLSFNLNPGPWSIKETALITITANSGATGSMGTNPLALAELFYGETVNPAVAIFFMWMIVFIGYSFAGIARNFLLYDPQFTWPQALMQTTLFQTQSKSDKDAKQASKQMKVFFFVLIGLCIWQFFPEYIFPMTSSLAFLCWVAPENYTANFIGSGLGGMGFLNLSLDWSNITSSIMLYPYWVQVVQFAAFVLGAWILIPAAKWGDLSSYPYGLMSNSLFLGNGTKYPTTELLTPNLRLNETRYEELGPVHLGAQRAWNMFFDYAAYVSGFMWVVAFGYKSLSGSLKRLVKSRKQKGSINLQYTDRLNKLQAAYEEVPLYWYAILFLCAFVTLLVIFATNSLFMPWWCLLVGVAFGAVIVTPLVWLYALSNFQLPIGTFNELLYGYMIQNKTSRHPAGAMVYGAVGGDLFYRAQYILNDQKIAHYMHISQRAVFFSQIFGELIGVPINYAALRWVISSKRDFLDGTKVDKLHQWTGQTIVSYNTNAVQYVILGPDRLFKNYPVLPYGFLLGAGAPLVLYLLHRLFPKSKLKFHLWNTTVFFSTMSTFYGNLSTGYFSRFIGGTITMFWAFRYKHSLWKKYNYLLAAALDTGLNLSILLIFLFFSAGKTVNFPEWWGNNGKSVERCFAMS

SEQ ID NO: 170 - protein, 718 aa, Candida albicans
MTIETISNNEGIRQRSASESTHTHTYLDQLDIPQITLRSTIVGLLIGSLVLISNFQFGLQTGWVSMMSLPAALLAFSIFKLLPISIAKNFTDVENVFVQSIAVAVGTGPLCYGFIGIIPAMEKFMTSEESGLGRPLTFGLGQLMIWSLGLGLFGVFFAIPLRKQVIVKEKLPFPSGSATATLISVLHGSDIYQDKEEISEKLDIEEEEGRETGSIATESESLTQQSSKSQLITTTNIQDDYDSNMRSLIITFIISATYTILSFFLPILKKIPIFGNHLSVNYLWNFQPSPAYIGQGIIMGLPTVSYMLFGAILGWGILAPLAKHMEWAPGRIDDWINGGQGWILWISLTVMISDSLVSFVVVSIKSINNALDNFRQRRDLDQFLELQQSQQSEYLLQDQEETRSSTSSNENPENSTYDGKRTQEDCKYTMEVPERHLVSTKTTVIGIAVSTLLCIISLKLVFGNIVPIYASLAAIILAMFFSILGVRALGETDLNPVSGIGKLSQLIFALIIPSNHPAKILINLVAGGVAEAGAQQAGDLMQDLKTGHLIGASPKAQFIAQILGTLYSVGLSSIMYKVYNSVYKIPSDMFRIPTAVVWIDCSRLVTGQGLPPHIREFALVLGVIFGIISLLKNTVPPTSSYHKYLVYLPSGVAVGVGIYNTPNFTLARFIGGLICYNWQNIGPNGKIGMIIFSSGLVLGEGLFSGFTMLLTSLGVKHW

SEQ ID NO: 171 - DNA, 2160 bp, Saccharomyces cerevisiae
atggacaaattagtcgtgaattattatgaatacaagcaccctataattaataaagacctggccattggagcccatggaggcaaaaaatttcccaccttgggtgcttggtatgatgtaattaatgagtacgaatttcagacgcgttgccctattattttaaagaattcgcataggaacaaacattttacatttgcctgtcatttgaaaaactgtccatttaaagtcttgctaagctatgctggcaatgctgcatcctcagaaacctcatctccttctgcaaataataataccaaccctccgggtactcctgatcatattcatcatcatagcaacaacatgaacaacgaggacaatgataataacaatggcagtaataataaggttagcaatgacagtaaacttgacttcgttactgatgatcttgaataccatctggcgaacactcatccggacgacaccaatgacaaagtggagtcgagaagcaatgaggtgaatgggaacaatgacgatgatgctgatgccaacaacatttttaaacagcaaggtgttactatcaagaacgacactgaagatgattcgataaataaggcctctattgaccggggattggacgacgagagcggtcctactcatggtaatgacagcggtaaccaccgtcacaacgaggaggatgacgtccatacccaaatgacgaaaaactattctgacgtagtgaacgatgaagacatcaacgttgccattgccaatgccgtcgcaaatgtagattctcaatcaaacaataagcacgatggaaaagacgatgatgccactaacaacaatgatggccaagataataatactaataacgatcacaacaataacagcaatatcaataacaacaatgtcggtagccacggcatttcctcccactcaccatcctccatacgagacacgtctatgaatttagacgtcttcaattctgctaccgatgatataccgggcccatttgtcgttaccaaaattgagccctatcatagtcacccactagaagataacttgtcactgggtaaatttatcctaactaagattccaaagattttacaaaacgatttaaagtttgatcaaatactagaaagctcttacaataattctaaccatacagtgagtaaatttaaagtttctcattacgtggaggagtccggtcttttagacattttaatgcaaagatatggattaaccgccgaagatttcgaaaaaaggttactttcccaaatagccagacgtataacgacgtataaagcaagatttgttttgaaaaagaaaaaaatgggcgagtataatgatttacaaccttcttcatcttccaataacaacaataacaacgatggtgagctttctggcacgaacttgagaagtaactctatcgactacgccaaacatcaggaaatatcaagtgcgggtacctcatcgaacacaaccaaaaatgtgaataataacaagaatgacagtaatgacgataataacggcaacaataataatgacgcctcaaatttaatggaaagtgtgctagataaaacctctagtcaccggtatcaacccaagaagatgccaagcgtcaataaatggagcaagccagatcaaataactcattcagacgtgtccatggttggcctagatgaatcaaacgatggcggtaatgaaaatgtccacccaaccttggctgaagtagacgctcaagaagctcgtgaaactgctcagttagccatagacaagatcaattcttataagaggtccattgatgacaagaatggtgatggccataacaattcgtcgagaaacgtggtagatgaaaacttgatcaacgatatggattcagaagatgctcacaagtccaaaagacagcatttgtcagatatcacactggaagagagaaatgaagacgacaaactaccacatgaagtggcggaacagttaaggttactgtcatcgcatttgaaagaggtagagaatctacaccagaataatgatgatgacgtagacgatgtaatggtggacgtggatgtagaatcgcagtataataagaacacaactcatcataataaccatcatagccaacctcatcacgatgaagaagatgttgctggactaatagggaaagccgatgatgaagaagacctttct

SEQ ID NO: 172 - DNA, 2313 bp, Saccharomyces cerevisiae
atggataacgttgtagatccgtggtatataaatccctcaggcttcgcgaaagacactcaagatgaggagtatgttcaacatcatgataatgtcaatcctaccatacccccacccgacaattatattttgaataatgaaaacgatgatggcctcgataacttgttaggtatggactactataacatcgatgacctgttgactcaagagttaagagatctggatattcctttagtgccttctcctaagacgggcgatggttcttctgataaaaagaatattgatagaacttggaaccttggtgatgaaaacaacaaagtctcccactatagcaaaaaatcaatgtcctcacacaagagaggtctaagtggcacagcgatatttggatttctcggccataataagacattgagtatttccagtttacagcaatccattctaaatatgtctaaagatccgcaacccatggaactcataaatgaattgggtaatcataatacggtaaaaaataacaatgatgactttgaccatataagggaaaatgatggtgaaaatagctatttgagccaagttttgttgaaacagcaggaggagttaagaattgctcttgaaaaacaaaaggaagtgaacgaaaaattggagaagcagttgagagacaatcaaatacagcaagaaaagttgcgtaaagtattagaagagcaagaagaggtggcgcagaagttggtttctggggctacaaattctaattccaaacctggatctccagtaatactaaagacacctgccatgcaaaacggtagaatgaaagataatgctataatcgtcacaacgaactctgcaaatggcggatatcaatttcctcctccgacgttaatatcgcctcggatgtcaaatacttcaataaatggttcaccatccaggaaataccataggcaacgatatccaaataaaagcccagaaagtaatggattgaaccttttttcctctaacagtggttatttgagagattctgaactgctttcattttctccacaaaattataatttaaacttggacggcttgacttataatgaccataataacaccagtgataaaaacaataatgataaaaaaaatagtactggtgataacatattccgtctgttcgaaaagacttccccgggtgggctaagtatctctccaaggataaatggaaatagtttgagatcgcccttcctcgtcggcacagataaaagcagggatgatcgatatgctgctggcacgttcacgcctagaacacagttgtcacctatccacaagaaaagggaatccgtagtttccacggtctcgacaatatcacaactgcaggatgacactgaacccatccacatgcgaaatacccagaacccaacattaagaaatgcaaacgctttagcgtcatcaagtgtactacctcctattcctggttccagcaataacactccaattaagaattctttgccacaaaaacatgtatttcaacatactcccgtcaaagctccaccaaagaacggaagtaacctagctccgcttctaaatgcaccggatttaacagatcatcagttagaaattaagacacccatacgaaataacagtcactgtgaagtggaaagctatccgcaagtaccacctgtcacacatgatattcacaaaagccccactttgcatagtacgtctcctttaccagatgaaataatacctaggactacgccaatgaaaataaccaagaaaccaactactctgcctccgggtaccattgaccagtacgtcaaggaactacccgacaaactattcgagtgcttataccctaactgtaacaaagtattcaagcgtagatacaacataaggtcgcatattcagacacatttgcaagatagaccgtattcatgcgactttcccggttgcaccaaggcgtttgttcgcaatcatgatttaataagacacaaaatctcccataatgccaagaaatacatctgcccatgcggaaagagatttaatagggaggatgctctaatggtgcatagaagtcggatgatttgcaccggcggtaagaaattagaacattcgatcaacaagaaacttacatctcccaaaaaaagcctgcttgacagcccgcatgacacaagtcccgtaaaagaaactatcgcccgggataaagatgggagcgtcctaatgaaaatggaggaacagctgcgagatgatatgcgcaaacatggattactggatccacccccatccacagcagcgcacgagcaaaactcgaaccgcaccctttcaaacgaaactgatgctctctga

SEQ ID NO: 173 - DNA, 429 bp, Saccharomyces cerevisiae
atggcagatcaagtaccagttacaacacaactaccaccaataaaacctgaacatgaggtaccacttgatgctggagggagtccagtaggtaacatgggtaccaactcgaataacaacaacgagctaggtgatgtattcgacagaataaagacacacttccctccggccaaggtaaagaaaataatgcagacagacgaggatataggaaaagtttcacaagccacgcccgtaatagcgggcaggtccctagagttttttatagcgttattggtgaaaaaaagcggggagatggcaagaggacaaggaaccaagagaataaccgccgaaatactaaaaaaaacaattttaaacgacgaaaaattcgatttcttaagggaaggtctatgcgtagaagaaggccaaacacaaccggaggaagagagtgcctga

SEQ ID NO: 174 - DNA, 450 bp, Saccharomyces cerevisiae
atgaatctacagaacaacgttttaaatcagatacaccagattctgctgcctacgaatcctactctcgataaacctaatgctgaggctacaaaggaagaattttcgtctgcagaaaatagagatgaaaaagactatcttaccaaccagcagccgaaaaatctgagtactccctccaccagttccaacggtgaatttataccgcatattttttattcgctgcaccaaataaggaaggatccaaacaatctctcaaatcaattggaaaccttaacaggttcgattagacatcgtttgaaactttgtaaatctttgatatcggaaaacgaagataccaaggatttattaagtaaaagtccatcagaatggcaggatatcatccatcaacgtgaacaagaactgcaaattaagagagacgtcttggatgatctttatcgcaagttacaacgataa

SEQ ID NO: 175 - DNA, 3246 bp, Saccharomyces cerevisiae
atgtctgctgctcctgtccaagacaaagacactctgtccaatgccgagcgtgcgaagaacgtcaacgggttgcttcaggtgctcatggacattaacactctgaacggagggagctccgacactgctgataagataagaattcatgccaaaaacttcgaggcagctttgttcgcaaagagctcttcaaagaaagaatacatggacagcatgaacgaaaaagttgctgtcatgcgcaacacgtacaatacgaggaaaaacgccgttactgctgctgccgctaataacaacattaaacccgtggaacagcaccatattaacaacttgaaaaattctggcaacagcgccaataatatgaatgtcaatatgaatctaaacccacagatgttcttgaatcagcaggctcaggcaaggcaacaggttgcgcaacaattaagaaatcaacaacaacaacaacaacagcagcagcagcaacagaggcgtcaattgactcctcaacaacaacaattagtgaaccagatgaaagtggcacctattcccaaacaattactgcaaagaattcctaacattccacccaatatcaacacctggcagcaggtcactgctttggctcaacaaaagctattgacacctcaggatatggaagctgcgaaggaagtctacaagattcaccagcagttgctattcaaagcaaggctacagcaacaacaagcacaggctcaagcacaagctaataacaacaacaacggcctcccccaaaatggtaatattaacaataacataaatattcctcaacagcagcaaatgcaacctcccaattcaagtgcgaacaacaaccctttgcaacagcaatcatcacaaaataccgtaccaaacgtcctcaaccaaattaaccaaatcttttctccagaggagcaacgcagcttattacaagaagccatcgaaacctgcaagaattttgaaaaaacacaattgggtagtacgatgacggaacctgtcaagcaaagttttattaggaaatacattaaccaaaaggccctgagaaaaatccaagctttgagagatgttaagaacaacaataacgctaacaacaacggctcgaaccttcagagagcccaaaatgtccctatgaatatcatccaacaacaacaacaacagaacacgaacaataatgacaccattgccacttctgctacacctaatgctgccgctttctctcagcaacagaacgcaagttctaaattatatcagatgcaacaacagcaacaagctcaagctcaagctcaagctcaagctcaggcacaggctcaagcacaagctcaagcacaggcggcacaagcggcgcaagcgcaagcacaagcacaagcacaagcacaagcacaggcacaggcacaggcacaagcccaggcgcaggcccaagcccaagcccaagcacaagcacaagcacacgctcagcaccagccctcccaacaaccacaacaagctcagcaacaacctaacccactacatgggttgacacctactgcaaaggatgtcgaagtaattaagcaattgtccttggatgcttctaagaccaacctaaggcttacggacgtaacaaattctttatccaatgaagaaaaggaaaaaattaaaatgaagttaaagcaaggtcaaaagctttttgttcaggtgagtaatttcgccccacaagtctacatcatcacaaagaatgaaaacttcttgaaggaagtttttcagttaagaatctttgtaaaagagatcctagaaaaatgtgccgagggtatatttgttgttaaattagacaccgttgacaggttaattattaagtatcaaaaatattgggaaagtatgagaattcaaattttaagaagacaagctattttaagacaacaacagcaaatggcaaacaacaatgggaacccaggcactacttctactggaaacaataataatattgcaactcagcaaaatatgcaacagtcactacagcaaatgcagcatttacagcaattgaaaatgcagcagcaacaacaacagcagcaacaacaacagcagcaacaacaacagcagcaacaacaacagcaacagcacatatatccctcctcgactcctggtgtggctaattattcggcaatggctaatgcacccggtaacaatatcccatatatgaaccataaaaatacctctagcatggattttttgaactctatggaaaatacaccaaaagttcccgtatccgctgcggcaaccccatcactgaacaagacgatcaacggtaaggtgaatggcaggacaaaatctaatacgatacctgttaccagcattccatcaacaaataagaaactatcaatttcaaatgccgctagtcaacaacccactcctaggtctgcatcaaataccgctaagtcaaccccaaatacaaatccttctccactgaaaacccaaactaaaaatggcacaccaaaccccaataatatgaagactgtacagtctcctatgggtgcacaaccatcatataatagtgccattatagagaatgcattcagaaaggaagaactcttgttaaaagatttggaaatcaggaagttggagatatcttctcgttttaaacatcgccaagaaattttcaaagattctcctatggatttgtttatgagtacgctgggtgattgcttaggtatcaaagatgaagagatgcttacgtcatgcactatcccaaaggctgtggttgatcacatcaacggctctggcaaaaggaagcctacaaaagcggctcaaagggctcgcgatcaagattccattgacatttccataaaagacaacaaattggttatgaagagtaaattcaataagagcaataggtcgtattcgatagcgttgtccaatgtagctgctatattcaagggtatcggtggtaactttaaagacttgtccactttggttcattcatcatcgccgtccacatcttctaatatggatgtcggcaacccaagaaaaagaaaagccagcgtattagaaataagcccgcaagattcgatagcctcggtgctatcaccagattcaaatataatgagtgattctaaaaaaattaaagtagattctcctgatgacccattcatgacaaaatcaggagccacaactagtgaaaaacaagaagtaacaaatgaagctccatttttaacttctgggactagttcagaacaattcaatgtatgggattggaataattggacaagtgctacttga

SEQ ID NO: 176 - DNA, 1320 bp, Saccharomyces cerevisiae
atggtcacaaaacatcagattgaagaggatcacttggatggagctacgacggatcccgaagttaaacgggtaaaattagaaaacaacgttgaagaaatacaacctgagcaggctgagaccaataaacaagagggcaccgataaagagaataaaggaaagttcgagaaagaaactgagagaataggaggatctgaagtggttacagatgtggaaaaaggaattgtcaaatttgaatttgatggtgttgaatacacattcaaagagagacccagtgtcgtagaggaaaatgaaggtaaaattgagtttagggtggtgaataatgataatactaaagaaaacatgatggtcctaactggattaaaaaacatttttcaaaagcaattaccaaaaatgcccaaagaatacattgccaggttagtctatgatcgaagtcatctttccatggctgtcattaggaagccattgactgtcgtaggtggcataacatatcgacctttcgataagagagaattcgcagaaattgttttctgtgccatcagttcgacggaacaggtacgcggttatggtgcgcatctaatgaatcacttaaaagactatgttagaaatacctcgaacataaaatattttttgacatatgcagataattacgctattggatactttaaaaagcaaggcttcactaaagaaatcacgttggataaaagtatatggatgggatatattaaagattatgaaggtggtacgctgatgcaatgttctatgttaccaagaatacgatatttggacgcaggtaagattctattattacaagaagcggccctgcgaagaaaaataagaacgatttcgaaatcgcatattgtaaggcctggtttagagcaattcaaagacttaaacaatatcaaaccgattgatccaatgactattcctggcttgaaagaagccggctggactcccgagatggatgcgttggcacaacgtcccaagcgtggtccacacgatgcagcaatacagaatatactcacagagctacaaaatcatgcagcagcttggcccttcttacaacccgttaataaagaggaggtccccgactattatgattttatcaaagagccaatggacttgagcaccatggaaataaaattagagagcaacaaatatcagaagatggaagacttcatatatgatgccagattggtgtttaacaattgccgaatgtacaatggcgagaatacgtcgtattacaagtatgctaataggctagagaaattcttcaataataaagtaaaagaaatacctgaatattctcaccttattgattaa

SEQ ID NO: 177 - DNA, 3109 bp, Saccharomyces cerevisiae
atggtatggtatgatcataacacgcattctgaaaatgttatctgggaggttttcgatgggtatggagttttccttgattctcacttattatcccttgtattgtaattgatccttcagtaatatttgcagcctttcacaactatcctttttttcattgcttattactattgaaccttttttaggagttgcctgcttatgcaatataatttgctgacaagtagtaaattaccagcacaatattaagattaaaaaagaaattagccaagagcttgatatattatcttatacacaaacctttccgacctacttgataaagccacatacctctacctcttctattagaaatagaaaagtacaaaaatagcaaaaggaaataatttctttaaaataacattgtgtgaggttccaactatggattattaatagagtaacgcaaacttaaggaaaggaagtgctttacaattaagtatttataagaacgaatttatcccccaaaaaaaagcacctatacttaataaaaggaggggaatagctatcaattgagtgttgtctgcgtctgtctgcgtacaagaggatgaattttctgactcaggctatgtcagaaacttttcaagggacaaataacaggataaaacgtaatgtcaggacacaaagtgtgccatcaacttcctataataatggcaaagaatcatatggaccaaatactaaccaattaaatgccctactttctcaattggaacagcaaacaagtgttgatagtaccagcacgagctcaaacttttattccattgcacaatatattttacaatcatacttcaaggtcaatgtagattctctaaactctctgaaattggtggatttgatagtggaccaaacttaccctgattctttgacgctgcgaaagctgaatgaaggagcaacgggacaaccatacgattatttcaatacagtttctcgtgatgctgatatctccaagtgtccaatttttgcgttgaccatattttttgttatacgatggagccacccaaaccctccaatttcaattgagaattttactacagtaccgttgctagattcaaactttatttctctaaattccaatcctttactatatattcaaaatcaaaacccaaacagcaattcaagtgttaaagtttcaaggtcacaaacgtttgaaccttctaaagagttgatcgatttggtatttccatggctgtcttatttgaagcaggatatgcttcttattgataggacgaattacaagctttattctctctgtgaactatttgaatttatgggcagggttgccattcaggatctccgatatctgagtcaacatcccttattactacccaatatcgtaacattcatttcaaaatttattcctgagttattccaaaacgaagagtttaaaggaatcggttcaattaaaaattcaaacaataatgccctgaacaatgttacaggaatagaaacccaatttttaaatccatctaccgaggaagtgagtcaaaaagttgattcttactttatggaattatcaaaaaaattaactacagaaaatatcaggttaagtcaagaaataacacaactaaaagcagatatgaactccgtaggcaatgtttgtaaccaaattttgctgttgcagagacaattgctttcaggaaatcaggcgatcggatcaaagtccgaaaatattgtgtcttccacaggtggggggatattaatactagataaaaatagcatcaattcgaacgtactgagtaatttggttcagtcgatagatcctaatcactccaagcccaacggacaagcccaaacacatcaaaggggtccgaaaggacaatcacatgcacaggttcaaagtactaatagccctgcgctagcgccaattaacatgttcccgagcttaagtaattctatacagccgatgcttggcaccttggctccgcaaccgcaagatatagtacagaagaggaagctaccgttaccaggttcaatagcctctgcagcaacaggcagtcctttttctccatcacccgttggtgagtctccctatagcaaacgctttaaactagacgataaaccaactccgtctcagacggctcttgattccttacttacaaaatccatttcaagccctagattacccctttcgacgttggctaacacagctgtcacggaatcttttcgctcacctcagcagtttcagcattctccagattttgtagttggtggtagctcaagttcaacaacggaaaataactctaagaaggtaaatgaagattctccatcatcttcttcaaaactagctgaacgacctcgtcttccaaacaacgactccactactagcatgcctgaaagtcccaccgaggtagctggtgatgatgttgatagggagaaaccgccagagtcaagtaagtcggagcccaatgataacagcccagaatcgaaagatcctgagaaaaatggtaaaaacagtaatccgcttggtacggatgctgacaaaccagtaccaatttctaatattcataattctactgaggctgcaaattcaagtggtacagtgacaaagacagctccatcatttccgcagagttcttctaagtttgaaattataaataaaaaggatacgaaggcggggccaaacgaggcaatcaaatacaagctgtccagagaaaataaaacaatatgggacctatatgcggagtggtatattggtctgaacggtaaatcttcaataaaaaaattgattgaaaattatggctggcgaaggtggaaggttagcgaagattcacatttttttcctactagaagaattattatggattatattgaaacggaatgtgatcgtggcataaaactcggcaggtttactaatcctcaacaaccgagggaggatatacggaagattttagtaggggacctagaaaagttcaggataaataacggtctgactctgaattctctatcattgtactttagaaatttaacgaaaaataacaaggaaatttgtatttttgaaaactttaaaaattggaacgttagatcaatgacagaagaagagaaattaaagtattgcaaaaggcgacataatacaccatcttaa

SEQ ID NO: 178 - DNA, 4947 bp, Saccharomyces cerevisiae
atgtctatgttcaatgccctcaattcaaacatcgaaggtgaacaatatgaagcagaggagcattcaagagagcttcaaatagaacagagttttaatattttgcaggacgctctgattgatctaaaaaacaaggacttcgaaaagtcggacagcaaattccaagagctcttccagattgatgtcgtcaagcctgataggtggggcatgtatcgcaattcttctcctacgctagataacctgcgatatctatgttataggaacagagggatgtactatcatctgtatttggagaataactatgaaaggttgaactcacaagaactagttaattgtattttaaaagcagttgagaacttggttgagtctattcaacatagcgatgctgattttgcagttacagatttgctggctcgcatcttcaagagctttaatagtgtcaagttggaacgtttaatatcagaatatgaattcactaagcaggaaaatctttcacttttgttggggcgacatcgtaaatttcttttgaacgatttgactctgatgatgaataactacgtagaactcacgaacaaactattagtccccaacttatcggataacacaatctttgagagatatcatttggagaagtacaaagatattaagccggaaccactagcttttggtccaattctttctagaatatcagaaatgaaaaagcaagatgaggaaataatgaaaaagctggacgtgtttaatgtcactttgaatgaagaatcatgggatgaagttgcgaaggctttgaaaaacttactacccagcgttaaaacatcgtctcttattggaaggaatatggatccgtataacgaaattgaagaacctattgaagcggttaagtttgaactatcggaagcaattaataatacaccatctttagatagagagtctgagcgacaagaagaagagcaagataatgagagtgtacgagcagatgataagagtgggaatttagctccatcggatatccaaactaatgaagaagcaaggcctaacaagagaactgatgaacatatcgatagcacgaagcctcttcaaagaagtagtaaacgctttaaagaaagagaacaagaaaactcaaaagagcttgttatggacgttcataaaagattttttggtgagttcaacacgttgttgtcatatattcacattctacccttttgcgattttgacacatttgcttccaaatttatcattggctctagtgacaaacaacccgaaaaatttattccctatactgatctctatgaatgtttgaaatcttggagtagtagatatactgatatttttaaccaaaatgactacttgtccagtggttctaacgaaaatgaggaattattccaactaaatgcgctcctgaaatctaatgcatttgatgataaggagagctttcctagatatttaaatgatttggactcggatcacatcagatcttttatttccgaagtgaatgcaggcaatcttcacttccatcaagtgcgtttgaaattattattcaaattgcttggaacttacgatgaaggaaacggaaggcgtctcattatagactacctttgggagtctcagcttctaaaaattgttttatggtttgtatttggaatcgaatcgaacatttttgcacttattaacaaaaacaaaaggcaatgcaaatatttggctttatcgatttacgaacttcttgttaaccatttagggaatattgtggaggaaatcacaaataaacggattcaaggacataagtcagcagacctaaaaagtcaaagaaataaagtcgagaaaagaataaggtcgtggcatactctgttagaacaaattgctgacgaaaaagataaagaactgtatgtacattttcaatggacgcattactgcttcttgcaatatacatgtgatatagtcgatagcagactctctgaaactttgacgtctttagaaaatactataaaggattcagattcttctttagacattgcctatccgaattaccgtcatataccggcactaaacctaaacacagttcaatcccagaaaaggaaaataagaataatacaaaacataacagtcgaagatatatctgaagacacgaactctgacactcattcagaaaatcatctagagacactagaaaaagtccttttacatatattacacccttcgactaatcattcaaatattgatgaggagatggtttcctttattttcaactcaccatttttattgaaaattagactttggggcgttctcttttcgtcatatgtcaaaaaatccagtatacaggatgttcaaagaatttatttccacgtacttgattttatgaagggcgcattgacgtcacctgtctacaaagaatcgaacccacacggaaggcaccaaatgttattaacagtgttgacagcaattggctatctctcaagccaactgacagcgatactaaattcaaataggtgggaaagcagcgattttgtcttggaggactatatgtttgaaaagctgctgcaaacattcttcttcttttatactgtccttttctatgaaagctctgcggttaacgacgtttctaataagtcttttttcaaaagagcatcgaaatcatcagggaaaatgaaggatataatgatagatttagcgacgttgatactttattattatgatttacaagcaaagctcaggacacctgctgaacaaggtattgaaacaacggaactaatttggtccttacacactctttttggacatttccatttttgtgatgcatcaaatggaaagttcctagatttagctgaaaaactattgtgccagttcattaataatgattcttttttacaattgaagcaaatactgtggtgtagatatcactacgcgatagctagtgataacttcagtcctgatctgcatgatacaaaagcggtagagatggaaaagatacactctttgcctttaggtacatatctaatcaaattacagtatcaaaataagaacccttacctgtcgtcgtcaaagaccaccctaaaacagataatggataatattatagaaaaaattggcgacccatcaacgctggacaatcatatcatatctagaaactcatttctattaaatgaatatttatcaaggccaataacggcagacttgttgaagcatacattttctggtgcaacaagtttgtatttaacttctccaaacgacgagttacagcaaggcatgacagccggcttgttctacgtatccagcttacagtccctgggtttgtataaaatgagaaagaagtctatgcaagcaagaccttctgaattagactccattatcagaatgttaaagaatgacattatatacaacacaaaccgtttcgaaagttggatattactcggaaagtgttacagttatattgttgaagatgatttaatatggacctcagataagatcactgtccctgagaaaaaagatgttattgctttgactcaaagaaaggcaatattgtgttatttaatggccatttccatttattatagtaagttggatcgaactattgacgataaaaagattatattggaggcattggatgacttaggatctatgctgattagcggctactataatcccatgaataagctttgttttagctggaaaagcagtgctgagaatacaatgagattgtctgaaaccggtgaagtagtaatggaaaaaactaagaaaatcaccacaatctcagactttaacatcgagcaaagtatatttttatgttttaatagggcttgttctttatccggcgatatcaagtcacaggacgatgtattcgtgttgaattggtctagtttttacaatctggccaagttctttttcaaaacagatggtggtaataattgtaaattagttgccaaatatattactcagggttgccaaatagcttatgagtcatcacctgctaaagatccgatcatagaaccccattatctgttagttaatgcttgttacaagtgggtaaaaagaggcgtcataggtgttaacgaagctctgaccttactgtctaaagataaccaattcttccaggaacaagaggaattttgggtcaacgacgaaggtcttgcatgggattatcaagaaaaattcttttttgacaaaatcataagactacttcgccatttactatctgttgataaaaaaaaatggcagcacagacctcgttacagaatagcgcgcatattgtttgacgatttgggtgatgtgaacggtgctttggaggagatggatagcttaatatccgcaaaaagtataaacaaaaacttggtcaatatatggaaaccagattttgaaaggccagggaaacatttcatctatacttaccagtacctggttttgtatttggatttactcttcgcaataaaagacttcaatacaacaggtcttgttataaaaaagctaaggcgatttggttctggaactgtgaacgtaaacgaactattagagcgtgccattaatgtgtacacgcaaagtgccaaaatcaagctgcaattgcaagacaagagctacgtggagcaaatccttccaaccttgaactaccaagaattcctgaagattagtgagcaactgaaccaagttttcgaccaaggaaagtaccctgaagaaatatcatccgggttaaaacttgctttccagttgaaaaagggacatagcggaattgcatttgacagcgtttgcttgggcatttatttcgagtatctctattttcctctagctcgacaggatcaatccctcacagacgtgaacgatgaaaacaatccagcactaccgtcatcaggttctgtgacatcaaaaagcactccagaccctacttctaagccaagtgcaattaagaaacgtgttacaaagaaggaagtcttcgatagagtgaggctattagtggataagatcacgtga

SEQ ID NO: 179 - DNA, 2502 bp, Saccharomyces cerevisiae
atgaataatgctgcaaatacagggacgaccaatgagtcaaacgtgagcgatgctccccgtattgagcctttaccaagcttgaatgatgatgacattgaaaaaatcttacaaccgaacgatatctttacgaccgatcgtaccgatgcaagtactacatcttccacagccattgaagatattattaacccctcattggatccgcagtcagcagcatcgccggttccttcttcctcttttttccatgactcaaggaaaccttccaccagtacacatttagtaaggagaggtactccattgggaatttaccaaaccaatctatacggtcacaatagcagagaaaatactaatcctaatagtacattattatcttctaagttactcgcgcatccaccagttccttatgggcaaaatcccgatttactacaacatgctgtgtacagggcacagccgtcaagtggaaccactaacgcgcaaccgcgccaaaccacaagaagatatcaatcccataaatcacggcctgcatttgttaataaactatggagcatgttaaacgatgattctaatacgaaacttatacagtgggcggaggatggaaaatcttttattgtcacgaatagggaggaatttgtgcaccaaattttaccaaaatattttaaacattccaatttcgcttcctttgtaagacaattgaacatgtatggatggcataaagttcaagatgtcaagtcaggatcaattcaaagtagttcagatgataagtggcaatttgaaaatgaaaacttcattagaggtagagaagatttgctggaaaaaataatcaggcagaaaggttcctccaataaccataatagccctagtggtaacggtaatccagcgaatggtagcaacatccctctggacaatgccgcaggaagtaataatagcaataataacatcagtagtagtaattcattttttaacaatggtcatttattgcagggtaaaacactaagattaatgaacgaagcgaatcttggagataagaatgatgtcaccgcgattttgggggaattagagcaaataaaatataaccagattgcaatttccaaagatttactaagaataaacaaagataatgagttattatggcaagagaatatgatggccagggaaagacatagaacccaacagcaagccttggaaaaaatgttcagattcttgacatctatagtcccacacttagatcccaaaatgattatggacgggctgggagatccgaaagttaataatgaaaagctaaacagtgcgaataacattgggttaaatcgcgacaacacaggcactatagatgaactaaaatccaacgattctttcataaacgatgatcgtaattctttcaccaatgctacaaccaacgcccgtaataacatgagtcccaacaatgatgacaatagtattgacaccgctagcactaataccaccaacagaaagaaaaatatagatgaaaacatcaaaaataacaacgacataattaatgacattatatttaataccaaccttgccaacaatctcagcaattacaattccaacaataatgctggctcgccaataaggccctataaacaaagatatcttttgaaaaatagagccaattcctcgacatcgagtgagaatccaagcctaacgccctttgatatcgaatctaataatgaccgcaaaatttcagaaattccttttgatgacgaagaagaagaagaaacggattttaggccttttacctcgcgagatcctaataaccaaacgagtgaaaacacttttgatccaaacagatttacgatgctctctgatgatgatttaaaaaaagattctcataccaatgacaataaacacaacgaaagtgatcttttttgggacaacgtacatagaaatatagacgaacaagatgcaagactccagaacttggaaaatatggttcacatactttctcctggatatcctaataagtcgttcaacaacaaaacttcctcgacaaacactaattccaatatggaaagtgctgtcaacgttaatagccctggtttcaacttacaggattatttaactggagagtctaattcccccaattctgttcattctgttccctccaatggcagcggctccacaccgttgcccatgccaaatgataatgacaccgagcacgcaagtacaagtgtcaatcaaggcgaaaatggaagcggattaacgcccttcctcacggtagatgatcacacactaaacgacaataacactagtgagggaagtacaagggtgtcccccgatataaagttcagcgccactgaaaacactaaagtgagtgataacctgccaagctttaatgaccacagttattccacccaggccgacacggcgcccgagaacgctaagaaaagatttgtggaggaaataccggaaccggctatagtcgaaatacaggacccgacagagtacaacgatcaccgcctgcccaaacgagctaagaaatag

SEQ ID NO: 180 - DNA, 1794 bp, Saccharomyces cerevisiae
atgaacaccggtatctcgcccaaacaggacgacgcctctaactccaacttactcaacataggccaagaccattcgctgcagtatcagggtctcgaacacaacgactcccagtacagagatgcttctcaccagacacctcaccaatacttgaaccagtttcaagcccagcctcaacaacaacaacagcagcagcagcagcaacaacagcaacaacaacaagcgccttatcaaggtcacttccagcagtcgcctcaacaacaacagcaaaatgtttattatccactacctccacaatctttgacgcaacctacttcgcagtcgcaacaacaacaacagcaacaacaacaacaacagtatgctaattcgaactcaaattcaaacaacaatgttaatgttaacgcgctacctcaggatttcggttacatgcaacaaaccggatcgggccaaaactatccgacgatcaatcaacaacaattttccgagttttacaactcctttttaagtcatttaactcaaaaacagacaaacccttctgtcacgggtacaggcgcgtctagtaacaacaacagtaacaacaacaatgttagtagcggcaataacagcactagcagtaatcctgcccagctggcagcctcccaattaaaccctgccacggctgctgcggccgccgcaaacaatgctgctggcccggcttcgtacttgtctcagctcccacaggtgcagagatactacccgaacaacatgaacgctctgtctagtcttttggacccttcctctgcaggaaatgctgcaggaaatgccaacaccgctactcatcctggtttgttaccacccaatctgcaacctcaattgactcaccaccagcagcagatgcagcaacagctgcaattacaacaacaacagcagttgcagcaacagcagcagctacaacagcaacaccagttgcaacaacaacaacaacttcaacaacaacatcatcatctacaacagcaacagcagcaacaacagcatccagtggtgaagaaattatcttccactcaaagcagaattgagagaagaaaacaactgaaaaagcaaggcccaaagagaccttcttccgcttatttcctgttttctatgtccataagaaatgagttgcttcaacaattccctgaagcaaaggtccccgaattgtctaaattggcttctgcaaggtggaaagagttaacggatgatcaaaaaaaaccattctacgaagaattcagaaccaactgggagaagtacagagttgtgagagatgcttacgaaaagactttgcccccaaagagaccctctggtccctttattcagttcacccaggagattagacctaccgtcgtcaaggaaaatcctgataaaggtttaatcgaaattaccaagataatcggtgaaagatggcgcgagttagaccctgccaaaaaggcggaatacactgaaacttacaagaaaagattaaaggaatgggaaagttgttatcccgacgaaaatgatccaaacggtaacccaaccggtcactcacataaggccatgaacatgaatttgaatatggacactaaaatcatggagaaccaagacagtatcgagcacataaccgcaaatgccatcgactcagttaccggaagcaacagtaacagtaccaacccaaatacgcccgtttctcctccgatttcattacagcagcagccgctccaacaacaacaacaacagcagcaacaacaacaacacatgttattggctgaccccactacaaatggttcgatcataaaaaatgaataa

SEQ ID NO: 181 - DNA, 1296 bp, Saccharomyces cerevisiae
atggtagtacaaaatagcccagtttcgtctgttcacacagccaatttctctgaacgggggagcaataccagaacaatgacgtataaaaataagcttactgtttgcttcgatgacatcctaaaagttggagcagaaatgatgatgcaacaacagttaaaaaatgtacaactagattcttatctcgtcaatggtttcagtcaatctcagcaaaaattattgaaagagaaggttaaattatttcatggaattttagatgatttagagacttctctaagccagagttcttcatatttagaaactcttactgcactcggaaaagaaaaggagaaagaaagagaggaagctgaaaaaaagagggctgaacaagaaaatatgaggaaggttagagaacaagaagaattaaaaaagcgacaagaactcgaagaagcctcccaacagcagcaactccagcaaaattcaaaggaaaaaaatggccttggtttgaacttctccacaacagcacctgcgaacacaacggatgccaacggttccaaagagaattatcaagaacttggatctcttcaatcatccagtcaaacacaacttgagaacgcaaatgctgctaataacggtgccgcattttctcccttaaccactactcgaatccaaagccagcaggcccaaccctcggatgtaatgttcaacgatttaaactctatggatatttcgatgttttcaggccttgacagtactggttttgactccacagccttcaatgccacggtggacgaaaccaaaggctttgacgataatgactcaggtaacaactacaatgacataaatatttcttctattgaaaacaacataaataataatatcaatagcaccaagaacggcaaggataacaacaacgaaagcaacaaaaataacaacggcgatgaaaagaataagaacaacaacgaggacaacgagaacaacaacaacagcagtgagaagaacaacaataataataataataacaataacaacaatgacgataacggcaacaacaacaacaacaacagtgggaacgacaataacaataccaccaacaacgacagcaataacaagaacaattctatcactaccggaaatgataatgaaaatatagttaataatgatttaccaacgaccgttgtttccaatcctggagataaccctcctccagccgacaacggtgaagaatacttgacattaaatgatttcaacgaccttaatattgactggtcgaccactggagataatggcgaattagacctcagcggcttcaatatatag

SEQ ID NO: 182 - DNA, 576 bp, Saccharomyces cerevisiae
atggaggatcaggatgctgcatttatcaaacaggctacagaagcaatagtggatgtatcattaaatatagataacatagatcctataataaaagagttattagaaagggtaaggaataggcaaaacaggttacaaaataaaaaaccagcactcataccggcagaaaatggtgttgatataaatagtcaaggcggtaacataaaggttaaaaaggaaaacgcattaccaaaaccaccgaagtccagcaaaagcaaaccccaagatcgtagaaatagtactggtgaaaaaagatttaaatgtgcgaaatgttcgttggaattttcaagatcatcagatttgagaaggcacgaaaagacacacttcgccatattgcctaacatttgtcctcaatgtggcaaaggttttgcaaggaaagatgcattgaaaagacattatgatacactgacatgtaggagaaacaggactaaattactaactgcgggtggtgagggtatcaatgaattactgaaaaaagtcaagcaatccaacatcgttcatcgtcaagataacaaccacaatggtagcagtaatggctga

SEQ ID NO: 183 - DNA, 2019 bp, Saccharomyces cerevisiae
atgaagcaggagcagtcccacgaaggcgactcatacagcacggaattcataaatctctttggcaaagataccgcaacacaccctagcagcaacaacggtgctaataataatggcatggggagcacgaactcgttggaccagtttgtggcaacagcctcatcgtcatcttctctggtgaccagcagcgagaataggcgccccctaataggtgacgttaccaataggggcaacactaacctatatgaccacgctgtcacgccagaaatactcttagaacagttggcctacgtggataacttcataccatctctggataacgagttctctaatgtggattggaatgtgaataccacccataataatgcaaacaataatggcgcggacactttcagcagcataaatgcaaatccttttgacttggatgaacaactagccattgagttgagtgcgtttgccgacgattctttcatcttcccagacgaggataagccgagcaataacaataacaacagcaataatggtaatgacgaccatagcaaccacgacgtattgcatgaggacccttctaccaataatagacaaagaaatcctcacttcttgactcaaagaaggaatactttcctaacttcccaatacgaccaatcaaagtctcgattttcgtccaaaaacaaaagaaatggcaataacggcgaaacaaacaactttggcgacaatatgcaaaataaccatccttttgagccaaactttatgggaagcccttctcagtttcccgctgacgcaactaatatgacatcaatcgaccatggcggcttcacaaatgttgacattacatcaactgagaacaatactaccggtgacaatggagtggatgcgctatcaaatctactacataggacaacacacacaccgaaccgctcctcccccctaagcaatgtcacttctgctcaaaattcctcttcacaacaacgaaaacattcggaaagcaaagtcgatagtaacagcgataataacagctccaacaaagcccccaatataactgttcctgactattcaattataccaacctctgttttagtaactctattaccgagggtcaacgtgcccaacggcgcatataactcgttgatcagcgcgggatttgacaatgatcaaatagatgctatagccgcaataatggcgtatcatcatcaaaaaaagattagggaaaataacagtaataataataaaaacatcaacaccaatgacagtcaagaggcacccattctaaaaaacatcaacgaacttttaagtgtcttaataccaccctctccggctgaaactgctgcgccaactaccttatcaacgtcgccttcgttcaatgagcacggtgtagtagcagaggcttcttttctaagctccattttggaactgggcataaagcatccaaaaagtaataatattcacaatcaacgacaaccttcacgaaacgatcataaaatatcaagagagagtgacggtaacaatggaaacgataatgtccatcataataacgctgttattaagtcaagtacgacgcgtggagacgaaattgccaagatacgatccgagccaactttaaatgcaagttcttctgatcacaaggaaaatagtttaaaaagatcacactccggagatttgaaaaataaaaaagtacccgtcgaccgcaagtattctgataatgaagacgatgaatatgacgatgcagatttacacggctttgaaaagaagcaactgatcaagaaagagttaggggacgacgatgaagatttattgatacagtcgaaaaaatctcatcaaaaaaaaaaactaaaggaaaaggagttagaatcatcgatacatgaactgaccgaaattgcagcatccttacaaaaacggatacatacgttagaaacggaaaacaagcttttaaagaatttagttctgagtagcggtgaaacggaaggaataaaaaaagctgaaagcttaaagaagcaaatttttgagaaggttcagaaagaataa

SEQ ID NO: 184 - DNA, 2277 bp, Saccharomyces cerevisiae
atggataacacgaccaatattaatacaaatgagcgctctagtaacacggattttagctcagctcccaatatcaaaggtttgaatagccatactcagttgcagtttgatgcggattctcgagttttcgtttcggatgtaatggctaagaactctaagcaattattgtacgcccatatttataactatttaatcaaaaacaattactggaactctgccgcaaaatttttaagcgaagctgaccttcctttatctagaataaacggatctgcttcgggtgggaaaactagcttgaacgccagcctgaagcagggattaatggatattgcatctaagggtgacattgttagtgaagatgggctattaccttcgaaaatgctgatggacgctaatgacacgtttttactggaatggtgggaaatttttcaatcattgttcaatggagacctagaatctgggtaccaacaggatcataatcctttaagagagagaataataccaattttgccagctaattctaaatctaatatgccttcccatttctctaatctcccaccaaatgtgattccaccaactcaaaatagttttccagtttcagaggagagttttaggcccaatggtgacggaagtaactttaatttaaacgatccaaccaatcgaaacgtctccgaaagatttctatcgagaacttccggtgtctacgacaaacagaatagcgctaattttgcacctgatactgctataaacagtgatattgctgggcagcagtacgcaactataaatctacataaacacttcaatgatttgcaatcaccagcacagccccagcaatcatctcaacagcagatccagcagcctcagcatcaaccccagcatcaaccgcaacagcaacagcaacagcaacaacaacaacaacaacagcaacagcaacagcaacagcaacagcagcaacagcaacagcaacagcaacaacatcaacagcagcaacagacaccgtatcctattgtcaacccacaaatggtccctcatattccatcggaaaattctcattcaaccggacttatgccttcagtgcctcctacaaatcaacaatttaatgcacaaacccaatcttcaatgttttcagaccagcagcgcttctttcaatatcaattacaccaccaaaatcaaggacaggcgccatcttttcagcaaagccaatctggcaggtttgatgacatgaacgctatgaaaatgttttttcagcagcaagcactacagcaaaattcactacagcaaaatcttggaaatcaaaattatcaatctaatacacgtaacaatactgcggaagaaactacgcccacaaatgacaataacgcaaatggcaatagtttattgcaagaacacatacgagcccgcttcaataagatgaaaacaattcctcaacaaatgaaaaatcaaagcactgtcgcaaatccggttgttagtgatataacatctcaacagcagtacatgcatatgatgatgcaaagaatggcggctaaccagcaattacaaaatagtgcctttcctccagacactaatcgtatagcgccagctaacaacactatgccattacaaccaggaaatatggggtctcctgtcattgaaaatccaggtatgaggcagactaatccatccggacaaaaccctatgatcaatatgcagcccttatatcaaaatgtttcttccgcaatgcatgcgttcgctccgcaacaacaatttcatctaccacaacattataaaaccaatacttcagtaccacaaaatgattctacctccgtctttcctttgcctaacaataacaataacaataacaacaacaacaataataataataataataatagtaataatagtaataataataataataataataataataataataatagtaataatacacccacagtatcacaaccatcatcaaaatgtacttctagctccagcacaactcctaatataactacaacaattcaacccaagcggaaacagagagtgggtaaaacaaagaccaaggaatcaagaaaagttgctgcagctcagaaagttatgaaatctaagaaactggaacaaaatggtgattcagctgctacaaacttcatcaatgtcactccaaaggacagtggcggtaagggtaccgtaaaagttcaaaacagtaactcgcagcaacaactaaatggctctttttctatggatacagaaacattcgacatatttaacattggtgacttttctcctgatctaatggatagctaa

SEQ ID NO: 185 - DNA, 3144 bp, Saccharomyces cerevisiae
atggtcgaaaatagtacgcagaaggccccacatgccggaaatgatgataatagctctaccaagccatattcggaggcgtttttcttagggttcaataacccaacgcctggattagaagctgagcactcaagcacatcgcctgcccccgagaactccgaaacacataataggaaaagaaatagaatattgtttgtctgccaggcttgtaggaagtcaaaaacaaagtgtgatagagaaaaacctgaatgtggtcgatgcgtcaagcatgggttaaaatgtgtttatgacgtatcaaaacagccagcaccacgaattccgagtaaagacgccattatatcaaggttggaaaaagatatgttttattggaaagataaagctatgaagctactaacagagagagaggtgaatgaatcaggcaagagatcagcaagtccgatcaatacaaacaatgctagcggggacagtcctgataccaagaagcagcataaaatggaacctatatatgaacaaagtggtaacggggatataaacaatggtaccagaaatgatattgaaatcaacttgtatagaagtcatccaaccatgatcatgagtaaagtcatgaaaagagaagttaagccgttatctgaaaattatattataattcaggactgttttctaaaaatcctggtcacttcagtgttccttgacacttcaaagaacacgatgataccggcattgacggcaaacgcgaatattacaagagcccagcctagcgtagcaaataaccttttgaaattgaaggaaatgctaatcagacagtgtcaaaccgaagatgaaaaaaatcgtgtaaacgaattcactgatagaatactacaaaatacaaattcaaatagaaacttgaaaatcggtatgctattatcaatgctttacaattctgtcggttaccaatatctggaggatcattgccctcaaggtggcgaatattcggatttattgagaaatttgatcaatgaatgtgaagctattttgccatcttacgaaattattgaacgctacaagaaccacttttatgagtacgtttatccaagtctacctttcatcgaattagaaatttttgaagaatcattaagtcaaacaatttttccggacccaaacaacccctccaaggtgcaaatacgtatgggtagcacacatttgagagctaaggtggaaaacttgagtcttctattggttatcttgaaactctcatacatgtcaataaggtttttagatcatagtacagcagactcgagtttttatctttcaaaggaaataattgataaatacccaataccgaacgattttattttattgagtcaaagatgtctagcatcggaaaattggtgtgcatgcgctaatgaaaacatcatatcatgtttactatatatctggtctttttttgctttttctcctgaagagggtgatttctttctcgagcaccccaccgatgttatcagtagtttgataatgatgctttccacctcgattggtctccacagagatccttcagatttccctcaattgatttccccgtccacctcagataaaagaaccttgaatcacagaagaatactctggttgagtatcgttaccgtttgttcgtttgaagcaagtctcaaaggtagacattctgtctcaccgatatctttaatggccttattcctaaatattaaggatcctgattctctgacggtatatatgaaccgagttaggggcgatctaagcgatatcaataatcacaaacttttgagaattcataaatttacattcaagagagcccagcttgcgttactcctgtcggacttagataacttgacgatgacatactatggtagtttccatttgcattcaattgaattcataagagaaaagattgagatttttgtggaggaaaactttcccatagtaccattaaaaagtgtcgcacaggataagtcagaccttgatgacatgaatgtgatttcagaaatgaatatattatcttcagaaaattcttcttcatttcacaatcgaataatgaataaactattgatgttgagaacttcaatggccgtattcttgcattttgaaacacttatcactaaggataaaagtatcttcccattctacaagaaatactttatggttagctgtatggatgcgttgtcactaataaattatttcaataagtttttcaacggagaatatcgacacgcaatatcttctttaaccagttttaatgttacaaaatttattcagttagcactatccagcacaatcttcagcctattagggattatactaagaataggtttagccatccatatgttatcttctgaagtacaaaagttatcgggaacgacagatccaagaataaaggagttaaataccaaagtcgaaaaatttagtaccctgcaaagagatctcgagtctgctttagaaggtatatattgctctgcttcggaacatttaagattcacatacttccccgtttttaagatgttggctttattcgatgtcattgtacaaaggatgagaaagggtgaattatggcacggcatatttacgatgattcaaatggaacaaatgcattctaggataatcaagacattaagcattaccttaggagtcaaactggacaaaaaggataggctattagaggaattgatggcatgcaatcacgttgcgaattttagcgttgaagatatagatgagctgaaccgtaatatcaaaaaagagattcaaatttcttcaggattgaagccgcctgtaaacacaattgacttaaccaacggcgaaccattcggaaatgctgttcctaccttcacaaagacatggagttcatccttagataatttagaaaaactatcatcggccgctgcagttggtcagagcttggactacaacagtggtttacgtcagggtcctttggcgggtggtggttcaaaagagcaaacgccaatagccgggatgaataacttgaacaattcaatcaatgctacaccaattgtcgataactcatctggatcacaacttcctaatggtttcgatagaggccaagcgaataatactccttttccaggttattttggaggtttggatttatttgattatgactttttgtttggcaatgactttgcttaa

SEQ ID NO: 186 - DNA, 1596 bp, Saccharomyces cerevisiae
atggcttctacggaacttagcctaaaaagaaccttaacggatattttagaagacgagttgtaccatactaatccaggtcacagtcagtttacgagtcattatcaaaactatcatccaaatgctagtattactccatataagttggtgaataagaacaaggaaaacaacacttttacgtggaatcattcattacaacaccagaatgaatcgagtgcagcttcgatacccccacaacaaacctaccatttcccgatattcaacaaatacgcggatcctactttaactaccaccacctcttttacgactagtgaagcaacggccaacgatagacagattaataatgtccatctcataccaaacgagattaagggtgctagcgaaaccccattgcagaagaccgtcaatctaaagaatataatgaaagtatcagacccgtatgtaccgacacggaatacgttcaattatgatgttaaaatttccaacgattttttcgataacggtgacaatctatatggtaatgatgaagaagtgcttttctatgaggataattataatccgaaaatgcagtggtcacttcaagataatagcgccgcaataaacaatgaggatgcgagagctatttttaacaatgaatttgactctgatgacgacgatatcagtgatgatgaagaggatgaaatagaagaaaattgtttgcaacaagagcaacaccaagaggagcctttactgtcattggatgttacaccaatctcaatgtttggctcagatcaaaaaacgggtcgtgccaagagttctagtcatttatttaatgagtacagttacgttgactctaacatggacagcatttccagtgttgtatctgaagatctgttagatgaacggggacatgagaagatagaggatgaggatgaggataatgatcttgatgaagacgatatctacgatatctctctcttgaagaacagaagaaagcaaagttttgtcctcaataaaaacactattgattttgaaagatttccatctccctcaacctcggcaaacgtaccgtctactgctactaccggtaaaaggaaaccagcaaaatcatccagtaaccgtagttgcgttagtaacagtaatgaaaacggcacattagaaagaataaagaagcctacatcagctgtagtaagctcaaatgctagtaggcggaagctaattaattatactaagaagcacttatcttcacattcatctacaaattcgaattcgaaaccttcgactgcatcaccatcggcccatacgtcatcttctgacggtaataacgaaatatttacgtgtcagataatgaatctcattacaaatgaaccgtgtggtgcccaattttcaaggtcctatgatttaacgagacaccaaaataccattcacgctaaaaggaagattgtcttccgttgctcggagtgtataaaaattcttggatctgagggctatcagaagacgttttcgagactggatgctttaacaaggcatataaaatcgaagcatgaagatttgtcgttagaacaacgtcaagaagttacaaaatttgcaaaggctaatattggttatgtcatgggttaa

SEQ ID NO: 187 - DNA, 1461 bp, Saccharomyces cerevisiae
atgatgaacaataacgaaagtgaggctgagaaccaacgtctactggacgaattaatgaaccagacaaaagtcctccaggaaactttagatttttcgttagtgacacccactccacaccacaatgatgattacaagatacacggaagtgcctacccaggtggtgagactcctgcccaacagcatgaaaaactctcatacatcaatacgcacaactctaacgataataataacttaatgggcagtcaagcgaggtccaattcacaaactcctacagcttcgaccatatatgaggaagcagaatcgcaatcgtcttacctggatgatatgtttagaacaagccaaggcggtagacctgtcactcaaaattccatatcttccatagggcagggtcccttgagatcatcttattctatggcttacgactcacctgtggatagagcaatgaatactccattacagcaacaagaaggcttaaaagctgagttaccacatgactttttatttcagcatggcaccgatgacacaatgtataacttaactgatgatttgagctcctctttatcttctagcatcaattctgatatgatgacaccaaacacatattcatcatcattttcttataatccacaaagcttgggcccagcatccgtatcttccacatattccccaaaggtaagatcaccatcatcgtcatttcgtgcaggaagtttcctttcatcttcttttaggcatggtagcataaacacacccagaacaagacacacttcaataagtagcaatatgactgaaaatataggacctggaagtgttccaaagattttaggcgggttaacttctgatgagaaactgaggcgcaaaagagagtttcataatgccgtcgaaaggagaagaagagaattaataaagcaaaagataaaagaactcggccagttggttccaccatctttattgaattacgatgacctaggtaaacaaatcaaaccaaataagggtatcattttggatagaacggtcgaatatttacaatacctggccgaaattttagaaatacaagcacgaaaaaagaaggcgttattggcgaagataaaagaattggaagagaagaaaagttctgtcgcagcattatctccttttaccaataaccaccatgccagttcggggcaaaataatagcgagaatagtgaggaaagaattatagatattagatctgtcccaaatgctttgatgaatgaacaaaatagtaaggctgaattgcacaattgggagccaccgttatatgattcggtcggtaaccacaatcatgctggcactatggagagtcatccacatacaaacattcatgaagaattaaaggagttcttatcaggcgatttgattgaagccgaagataatgcaaaattaatgtttggagatgacaactctaatccagctgactatcttttagaatttggttcggggtag

SEQ ID NO: 188 - DNA, 2301 bp, Saccharomyces cerevisiae
atgagtgaagaggaaacggtctcagccccagctccagcttctacaccggccccggctggaaccgatgtaggtagtggtggagcagcagctggaatagctaatgctggtgctgaaggcggcgacggtgccgaggatgttaagaaacatgggtcgaagatgctagtggggcccaggccgccacaaaatgcgatattcatccataagctataccagattctggaggacgaatcgctacacgacttgatatggtggaccccttcgggcttatccttcatgattaagcctgtggaacggtttagtaaggctttggctacatatttcaagcatactaatatcacgagctttgtaagacagttgaacatttacggctttcacaaggtgtcgcatgatcatagcagcaacgacgctaatagtggcgacgacgccaatactaatgatgacagcaatactcacgatgataatagtggcaacaaaaacagtagtggcgacgaaaataccggtggcggtgtccaagaaaaggagaaaagtaaccccactaaaatctgggaatttaagcatagttctggtattttcaagaaaggtgacattgagggactcaaacacattaagagaagagcttcttcccgtaataactcctcaattaacagtcgaaagaattctagtaatcaaaactacgatatagattccggtgcaagagtaagaccctcttcgattcaagacccgtccaccagttccaattcctttggtaatttcgttccgcaaattccgggcgccaataactctatccccgagtactttaataactctcatgtaacttacgaaaacgcaaaccatgccccgctggaatccaataacccggaaatgcaagagcaaaacagacctccgaactttcaagatgaaacactgaaacatttgaaagaaataaattttgatatggttaagattatagagtctatgcagcatttcatatctttgcaacacagtttttgttcacagagtttcaccttcaagaatgtgagcaagaaaaaatcggaaaatatcgtgaaggatcaccaaaagcaacttcaggcattcgaaagcgatatgttaactttcaaacagcacgtcatgtcgagggcccaccgtacaatagattctctttgtgctgtaaatgctgccgctaccgctgcctctgtcgcccctgcacccgcgcccacatccacatctgcatatgcacccaaatctcagtatgagatgatggttcctccagggaaccagtatgtcccgcagaaatcttcctcgaccacgaacatcccttcgagattcaacacggcttcagtgccgccctcgcaactttttgtacaataccaaccgcagtcgcaacaacatgtgacttatgcgaagcaaccggcacatgtaccaaactttatcaatcagccgatacccatccaacaactacctccacaatatgcagacacttttagcactccacaaatgatgcacaatccttttgcctcgaaaaataacaacaaaccgggcaacacgaagaggaccaatagtgttctcatggacccgctgactcccgcagcgagtgttggagttcagggtccactaaactatcctatcatgaatattaatccttctgtccgtgactacaacaagcctgtccctcaaaatatggctccgagtccaatatatcctattaatgaaccaacaacgagattgtattctcaaccaaaaatgagaagtctcgggtctacaagctctttgcccaacgatagaagaaacagtcctctgaagctgacaccgagatcatcgttgaatgaagatagtctgtatcccaaacctagaaactctctcaaatccagtatttcgggcacgtctttatcctcctcttttacactagttgccaacaatccagccccaattcggtactctcagcagggattgcttcgctcattaaacaaagctgctaattgtgctccagattcggtaactccattagactcgtctgtcttgacgggccctcctccaaaaaacatggacaatcttcctgctgtttcttcaaatttaataaactcccccatgaacgtcgagcacagctcaagcctatcacaagcagaacctgcaccacaaatagaactaccgcagccatctttgcccacaacgagcaccactaagaatactggcgaggctgacaatagtaagagaaaagggagcggtgtttattctttactgaatcaagaggatagcagcacgtccagtgctgatcctaaaactgaagataaggccgctccggcactcaaaaaggttaagatgtga

SEQ ID NO: 189 - DNA, 2052 bp, Saccharomyces cerevisiae
atggattttacaacaatgactatggcaagcaatatggctactagtactactacgacggctacatcggcacatgcatctataaattcgtcatcaaactttaatattgatattgattcgaaccagaatactccttccattttgataaataacaattcggattcttctaatggaaaaaacacagattttaacggcgtcaataatattcaccaaaaaaatatcatgaataatacaaataatgttcatttgtactctccaaatataatggaccaaacgctactaactccacaggacattgccaagttacggagagaatcaatagcccattctcaagggatgggtggtgtttcatggggatccattagtgttggttcttggttaagagatgaaattattagccgtagaaatagtattgtacctgcatcagcaaacggtgctgcctccgctgccgcttctgcaaccactactgccactaatactttgcagattcaacaaccaactaagagaccctctgttagtaatccgccttaccatagagggtattctatttctcctcagatagcctacactgcttatctgccaaatctagaaaagcaatattgtaaagattattcatgctgtggtctttccttaccaggtttgcatgatttgctgagacattacgaagaagctcatatatccacgtctcctaacactaccaatatgtcacaaataccgatgaactctgctggtaacactagttcatcagttcgtatgacaaataatacctcttctgccaactataacctgcagaataacatggccgctaatacaaaaaatgcaggtcataagactaatactatgcaggctcatagcagcaatgcaactaataacacctccattaataatatgcatgccaatcttcagagcaacatggattccaactccacaatacgacaatctcagcatcctcaccatcagcagaatataatacaacaacagttgcaatcgaattctgtaaatcatacatcaggggctgtacccacaccgagtgtaatgggttcagcaactgcgtcgtccacaactgcaaatccaaatgtgatatctataacgggtgcccccaactcgggcttatctatggctaatcactctcaacaactacatctgaatggtaatctagtcgatgccgtttcaacgaatgatgtgtttttaagaacgagcaattctccatcaagacacgttccgcacaataaacaaattaacagtaacaataatagtggtatcaatatcaataataatacctcacacaattctaatattaacatgggtagtaaaaacgccatggtgaatcgtccacatacttttaataactattccttgaacaaaacgtccaggaatcctattcaacatcaatcaagaaaaattgatcctcatcaaaccgatttatcacctctggtacttgtccaagatatagatttaagttttatggatgatgatattttgggccctagtaaccacaattccatgaactctgtcgtaaatccaactacaggttctcacaactacaatacttttcattcttccgtacacgcaaaatcttctcaaaacatggtcgaggatcaagacattgatgacattgatgatgacgatgatgttgatgatgacgatgacgatgacgatgacgatgacacagaaaatggctccagttccaatggaaaatcagttcataacaacaattacaagatgcctcagcaagcttatatagacgatcctgcgagaaggctctatgtaatggatcatgaggaacaaaaaccctttaagtgtccagttattggttgtgaaaagacttataaaaaccaaaacggtttgaagtaccataggttgcacggacatcagaatcaaaaattacatgaaaaccctgacggtacatttagcgtaatagatccagattcgacagattcttttggtgatggaatgggctctgcaaaggataaaccataccgttgtgaagtttgtggtaagagatataagaacttgaacggtttaaaatatcacaggggccactccactcactaa

SEQ ID NO: 190 - DNA, 1944 bp, Saccharomyces cerevisiae
atgtcaagcgaggaacgctcgagacaaccaagtactgtttcaactttcgatttagaacccaatccttttgaacaaagcttcgcctcttccaagaaggctttgtcacttccaggcacgatctcccatccgtctctaccaaaagagctttcacgaaacaattctacctcaacgataacacaacattcccaacgttccactcatagtttgaacagtattccagaagaaaatgggaattcaaccgttacagataatagtaatcataatgacgtaaaaaaagactcacctagttttttaccaggccaacaaagacctactataatatctccgcctattctcacacctggtgggtcgaaaagattaccacctctactcctttctccctctattttatatcaggcaaattcaactacgaatcccagtcagaattcacattctgtttcagtctctaattcaaaccctagtgcaataggcgtttcttctacctccggatctctgtatccaaacagctcttctccttcagggacttcacttatacgccagccacgaaactcgaacgtgaccacaagtaattctggtaacggcttccccacgaatgattcacaaatgcctggctttttattaaacttgtccaaatctgggttgacacctaatgagtccaatatcaggaccgggttgacacccggtattcttacgcaatcttacaattatcccgtattgccgtcaattaataaaaatactataacaggtagcaaaaatgtcaacaaaagtgtcacagtgaatggaagtattgaaaaccaccctcatgttaatataatgcacccaactgtaaatggtacaccacttacgccgggattgagttctctgctaaacttaccatctactggagttttggctaatccagtattcaaatcaacacctacaacaaataccacagatggtaccgtcaacaacagcatcagtaattccaatttttccccaaatacttcaacgaaagcggctgtcaaaatggataatccggcagagttcaatgccatcgagcactccgctcataatcacaaggagaatgaaaatttaacgactcaaattgagaacaatgaccagttcaataacaaaacacgaaaaagaaagagaaggatgtctagcacaagttctacttctaaggcttcaagaaaaaattccatatcaagaaaaaactcagcagttacgactgcaccagcacaaaaagatgatgttgaaaataataaaatttcaaacaacgtaacacttgatgagaatgaagagcaagaaagaaaaagaaaggagtttttagaaagaaatagagtagctgcatctaaatttagaaaaagaaagaaagagtacatcaagaaaattgaaaatgatctacaattctatgaatctgaatatgacgatctaactcaggtcattgggaagctatgcggcataataccctcaagctcctcgaattcccaattcaatgtgaatgtttcaactccgtcatcatcatcaccaccatctacatctttaatagcattgttagagagtagcatttcaaggagtgattattcaagtgcaatgtcagtattatcaaacatgaagcaattgatatgtgaaacgaatttttaccgaaggggaggcaaaaacccaagggacgacatggatggccaagaagacagcttcaataaggacactaacgttgtcaaaagcgaaaatgcgggctatccttccgttaattcaagaccaataattctagataaaaaatactcactgaactctggagcaaatatcagcaaaagtaacacaactactaataatgtgggaaatagtgcacagaatataatcaattcatgctactctgttactaatccattggtaataaatgcaaattccgatacccatgatactaataagcatgatgtactatccactctacctcacaataattga

SEQ ID NO: 191 - DNA, 1815 bp, Saccharomyces cerevisiae
atgagtgccaatagcccgacaggaaacgatccccatgtatttggtattcctgtgaacgcaacaccatccaatatgggttcgccaggcagtccagttaatgtaccacctcctatgaacccagcggtagcaaatgtaaatcatcctgttatgaggacaaacagtaatagtaatgccaatgaaggtactaggactttaaccagggagcaaatacagcaattgcagcaaagacaacgattattactacagcaaagactactcgaacaacagagaaaacagcaagcactccaaaactatgaggctcagttttatcaaatgcttatgaccttaaacaaaagacctaaaagactttacaattttgtggaagatgcagactcaattttgaaaaaatatgagcaatatttacacagttttgaatttcatatttatgagaataattataagatttgcgctcctgcaaatagcaggttacaacagcagcaaaagcaacccgagctgactagtgacggtttaatattaaccaaaaataacgaaactttgaaagaatttttagagtacgtcgcaagaggaaggattcctgatgctattatggaagtcttaagggactgtaatatccaattttacgaaggaaatcttattttacaggtttatgaccatactaatacagttgatgtcacccccaaagagaacaagcctaatttgaacagctcttcttccccttcaaataataatagcacacaggacaattccaagattcaacaaccatccgaacctaatagtggtgtggcaaatacaggcgcaaacacagcaaataagaaggcatccttcaaacgacctagagtatatcgaacattgttgaagcctaatgatttgacgacgtattatgacatgatgtcttatgcagataatgccaggttttctgatagcatttatcaacagtttgaatctgaaattttaacacttaccaagaggaacttgtcactaagtgtgccattaaatccatatgagcaccgagacatgttggaggaaacagctttttcagaacctcattgggatagtgaaaaaaaatccttcattcacgaacatcgtgctgagtctacgagagaaggcacgaagggcgttgtagggcatatcgaagaacgcgatgaatttccgcaacatagttcaaattatgaacagttgatgttgatcatgaatgaacgcacaacaacgataaccaactccacgtttgctgtttcgttaaccaagaatgcgatggagattgctagctccagttccaacggggtacgtggagcttcgtcctcaacttcgaattccgcatcaaatacaaggaataacagtttggctaatggcaatcaagtagctttggcagcggcagcggctgcggctgcagtgggatctaccatgggtaacgataataatcaatttagcaggctgaaatttattgaacaatggagaataaataaagaaaaaagaaaacagcaggctttaagtgcaaacatcaatccaacccccttcaacgctagaatatcgatgacagcaccattgactccacagcaacagctacttcaaagacaacagcaggccttggagcaacaacagaatggtggagccatgaaaaacgcaaataaacggagtggtaacaatgccaccagtaacaataataataataataataatttagataaaccaaaggttaagcgacctagaaaaaatgcaaaaaaaagcgagagcggtacaccagctcctaaaaagaaaagaatgactaagaagaaacagagcgcaagtagcacgccctcttctactacaatgtcataa

SEQ ID NO: 192 - DNA, 1014 bp, Saccharomyces cerevisiae
atgatggacaagcataagtatcgtgtggagattcaacagatgatgtttgtctctggtgaaattaacgacccacccgtagaaaccacatcactgatagaagatatagtgaggggtcaagtgatagaaattcttttacagtcaaacaaaacggcgcatcttaggggaagtaggagcattctccctgaagacgtcattttcttgatcagacacgacaaggccaaagtcaatcgtttgagaacatatctgtcatggaaggatttgcgtaaaaacgccaaggaccaagatgctagtgccggtgtagcgagtggcactggaaatcctggggcaggtggtgaagatgatttgaaaaaagcaggtggtggcgagaaagacgaaaaagatggtggaaacatgatgaaggtcaagaaatcccaaattaagctgccatgggaattgcagtttatgttcaatgaacatcctttagaaaataatgacgacaatgatgatatggatgaggatgaacgagaagctaatatagtcactttgaaaaggctgaaaatggctgacgatagaacacgaaacatgactaaagaggagtacgtgcattggtccgattgtcgacaggcaagttttacatttaggaagaataaaaggttcaaggactggtctggaatttcgcaattaactgaggggaaaccccatgatgatgtgattgatatactggggtttctaacttttgagattgtctgttctttgacggaaacagctctgaaaatcaaacaaagagaacaggtattacagactcaaaaggacaaatcccagcaatctagccaagataatactaactttgaatttgcatcatccacattacatagaaagaaaagattatttgatggacctgaaaatgttataaacccgctcaaaccaaggcatatagaggaagcctggagagtactacaaacaattgacatgaggcatagggctttgaccaactttaaaggtggtagactcagttctaaaccaattatcatgtaa

SEQ ID NO: 193 - DNA, 3999 bp, Saccharomyces cerevisiae
atgactgaaagaataccaataaagaattatcaaagaacaaatgccaaagctttacttaaattgactgaaaaactttttaacaagaacttttttgatctctatttaacctctcagcaattggtcgttcttgaatacctgctgtcgatttcaagtgaagaagacaaactgaaagcatgggactatttcttaaagggaaacatagcattaaatgtcgaaaaatcatttccattaacccaagaagaagaacatcacggagcggtctctcctgccgttgacacacgatcagatgatgtatcatcacaaacaattaaggacaataacaatactaataccaacaccagtatcagcaatgaaaatcatgttgaaaatgaaattgaagataaaggcgataacgcaatagcaaatgaagataattttgtgaataatgacgaaagtgataatgttgaagaagacttattcaaattagatctagaggacttgaagcagcaaataagcggaacaaggtttattggaaacttatccttgaaaatcagatacgtcttgtggcagtgcgccatagattatatatactgtgatcgtaatgagtttggtgatgaaaatgatacagaatacaccctattagatgttgaagagaaggaggaagaggaaattggtaaaaatgagaagccacaaaacaaagaaggtatttcgaagttcgccgaggatgaagattacgacgatgaagacgagaactatgatgaagacagtacagacgtaaaaaatgtcgatgatcctccaaaaaatctcgattctatttcctcttctaatatcgaaattgacgatgaacgacgcttggtgctaaatatctcaatatcaaaagaaacactgtcaaagttaaaaacaaataatgtagaagaaattatgggaaattggaacaaaatttaccacagttttgaatacgataaagaaactatgataaagcgattaaaacttgaagaaagcgataaaatgatagagaaaggaaagaagaaacgaagtcgaagtgatttagaagcagctaccgatgaacaagatcgcgaaaatacaaatgatgagccagatactaatcaaaaattgcccactcctgaaggttcaacattcagcgatactgggaacaagcgccccaaacaaagtaatttagatttaacagtcaatctaggcatcgaaaatttatcattaaagcaccttctatcatctatccagcaaaaaaaatcccaattaggaatatcagattacgaattaaaacatctgattatggatgtcagaaaaaatcggtcaaaatggacatcggatgaaagaattgggcaagaggaattatacgaagcctgtgaaaaggttgttttggaacttagaaactacactgagcattctacaccatttctgaataaagtgagcaaaagagaagcccccaattatcatcaaatcatcaaaaagtccatggacctgaatactgttttaaaaaaactgaaaagctttcaatatgactccaaacaagaatttgtagacgatattatgctaatatggaaaaattgtttgacctataattcagatccttcacattttttgagagggcatgctattgctatgcagaagaaatctcttcagttgattcgcatgattccaaatatcacaatccgaaacagggctgatttagaaaaggaaattgaagatatggaaaaagacaaagactacgaattagatgaggaagaggaagttgctggttctggaagaaaaggattgaatatgggagctcatatgttggccaaagagaatggcaaggtgtcagaaaaagatagctctaaaaccgtcaaggatgaagcaccaaccaatgatgacaaactaacttctgtcatccctgagggggaaaaagagaaagataaaactgcttcatctactgtaacggtacacgaaaatgtaaataagaacgaaataaaagaaaatgggaaaaatgaagagcaagatatggttgaggaaagtagtaagactgaggattcatcaaaagatgctgatgctgccaaaaaggatacggaagacggactacaagataaaactgcagaaaataaggaggctggggaaaataatgaagaggaagaggatgatgatgacgaagatgaagacgaagacatggtcgactcccaatcttatttacttgaaaaggatgacgatagagacgatttggaaatatccgtgtggaaaactgtaactgccaaagttcgtgcggaaatttgcttaaaaagaactgaatattttaaaaatggaaaattaaatagtgattcagaggcgtttttgaaaaacccacaaagaatgaaaaggttcgaccagctttttcttgaatataaagagcagaaagctttagaatcatatcgtcaaaaaatagagcaaaattccattatgaaaaatggctttggaacagtactaaaacaggaagacgatgaccaattgcagtttcataatgatcactctttaaatggaaatgaagcttttgaaaagcaacccaatgatattgagttagatgataccagattcctacaggaatatgatattagtaacgccattcctgacatagtatacgagggagtaaatactaaaacattagacaagatggaagacgcttccgtggaccgcatgcttcaaaatggtatcaacaaacaaagcagatttctggctaacaaggatttaggactaacacctaaaatgaaccaaaatatcacactgattcagcaaattaggcacatatgccataaaatatccctgatcagaatgttacagagccctttatcggctcaaaactccagaagcaatcccaacgctttccttaacaaccacatttataattacactattattgatgactcactcgatattgatccggtgtcacagcttccaacgcatgattacaaaaacaacagggagctgatatggaaattcatgcataagaacatatctaaggttgctatggccaatgggtttgaaactgcccatccatcagcaataaacatgcttactgaaatcgccggggattacctatctaatctgataaagactttgaagcttcatcatgaaactaactccttaaatagaggaacaaatgtggaaatgctgcaaacaacactgttggaaaacggtatcaacaggccagacgatctattttcctatgttgaatctgaatttggtaaaaaaactaagaaacttcaggacatcaaacagaaactagaaagctttttgagagccttattaaggccaactttgcaggagttgtccgagagaaactttgaagacgagagccaaagcttttttacaggtgactttgccagcgaattgactggtgaagacttctttggttttagagagcttggattagaaaaggagtttggagttttgagttcatctgttccattacagttactgactactcagtttcaaactgttgacggggaaaccaaagtgcaggccaaaaagatccaaccggaagaatcagacagcattgtgtataagaaaattacaaaaggtatgctggatgctggttcattctggaatactctacttcccctattacaaaaagattatgaacgttccaaggcctatatagcaaagcaaagcaagtcatctgcaaatgataaaacctcaatgacttccacagaagacaattctttcgctttactagaagaggatcagtttgtctcaaagaaaaccgcaacgaaggcaagattacctcctactggtaagataagtaccacatacaaaaagaaaccgatcgcaagcgcgtttatacttccagaagaagacttggaaaacgacgtaaaagcggatccaacaacaactgtaaacgccaaagtgggtgcagaaaatgatggagattcttccttatttttgcgaacgcctcaacctttagatcctttggatatggatgatgcttttgatgataccaatatgggcagcaatagttcatttagcttgagccttcctcgccttaatcaataa

SEQ ID NO: 194 - DNA, 734 bp, Saccharomyces cerevisiae
atgggaaaatcagcgtatgtaaagctggagcgtccttcgtggcgcatcggaatttcttcaattgaactacctgttgctaacaacagttttttttttctctcttttatgtatatagcgttatattcgtggaaagagccactcccgctacactaacggaactgaaggatgctctctcgaatagtatcctgtccgtgcgagacccttggtcgatagactttcggacgtaccggtgctctatcaagaacctacccgcggatgtctccaagctcatgtactcgataacgttccaccaccatggccggcagaccgtgctaatcaaggacaactcagcgatggtgacgactgccgcagcggcggatatccctccggcgctggtgttcaatggctcatctacgggcgttcctgagtccatagacactattttgtcgtccaagctgtccaacatctggatgcagaggcagctcatcaagggtgatgccggtgagacgttgatcttggacgggctcaccgtgcgactcgtcaacctcttctcctccactgggttcaagggtctcctgatagaactgcaggcggacgaagcgggcgagtttgagaccaagattgcaggcatcgaaggacacctagctgaaatccgggccaaggagtacaaaacctcatccgactcgttggggccggacaccagcaacgaaatatgtgatttggcgtaccagtatgttcgtgctctggagctgtga

SEQ ID NO: 195 - DNA, 4284 bp, Saccharomyces cerevisiae
atgaataacggttctggtcgatacttgctgactcccccagatgatcttcacccctatgtgccaagctcgaaacctcaggaacaagtataccctgatttcaagccttgggagcacactgcagcagaagatcaaatcctagcaaactttgtggctaagggcttttaccatacaccaatggtaaatttcgagtccatatctgcgagatcatctgttcatgaatcattagtcactcaatccaacattctttcccagcaattcgacaaaattatcaagattagagaagaccacattaataagatcccctcaaattccacgacgacattacacgggcctggttttcagttgcctaatagaataacccttactgatcatagaaaggaaacgtggttgcatgaattgagttcgtctcacacttcgctggtcaaaattggcaagtttatacctcacggcttgaaaagaaggcaagtcatcgagcagtgctatttaaaatttataccattgaaaagggcgatttggttgataaagtgctgctattttatcgaatggaaatcgaaccacaaaaagaagaggtcaaatgctgctggggcagatgatgccatttccatgcacctgctaaaggactggacggatacctttgtatacatcctggaaaagctcatctttgatatgacaaatcactataacgattctcaacaactgcgtacgtggaagaggcagatttcttattttttaaaacttttggggaattgctactcactaagattgatcaataaggaaatctttcatcattggcttgtagagtttataaataagatggaaaacttcgaatttttgccattatctttacatattttgatgattttttggaacgacatctgccaaattgatacaaatgctcctgttgcggctacaataacatcaagtcaaaaagagcccttctttctggtaacaaaaatcactgatatgctattgcacaaatattatattgtttccagcagcaaatcaatgataaatgacgagaactacatcatcaatgatataaagaaaaacaacaagataaagttgaatattctcaaaatattatccagtttaattttgaaaatttttcaagaacaatctttagaggtgtttatatttcccacatctaactgggaaatttacaagcccttactttttgaaatagtctcaaacgccgacactaatcaaaattctgatatgaagaaaaaattagagttaattagttacagaaacgagtcattgaagaataattcttctatacgaaacgtaataatgtctgccagcaacgcaaatgactttcaattaactatcgtcacctgtaaacaatttccaaaactatcatgcattcaattaaattgtatagatactcagttcaccaagctactggacgataaccctacagaattcgattggcccacttacgttgaccaaaatccccttacaatgcataaaattattcaattaattctctggtccatacatccatcaaggcaatttgatcactatgaatctaatcaactggtagcgaaattattactattgcgaataaattcaacagatgaggatttgcacgaattccagatagaagatgccatttggtcattggttttccaattagccaaaaatttttcggcccaaaagagggtggtatcatatatgatgccttctttgtatcgcctgcttaatatactaattacttatggcatcattaaggtccctacgtatatcagaaagctaatcagttccggcctactttatctccaagattccaatgataagtttgtgcatgtccagctgttaattaacttgaaaatttcaccgttgatgaaaagtcaatacaatatggtattgaggaacgttatggaatatgacgttaaattttatgaaatttttaatttcgaccaactcgtggaaatcacagaacaaatcaaaatgcgaatactctccaatgatataactaatttgcaactgtcgaaaactcctctgagcattaaaatcatggttgcagaatggtacttatcacatttatgttccggtattttatctagtgttaaccgcacagtgttgctaaaaatattcaagattttttgtatcgatctggaggttttccaccacttttttaagtggatcgagtttattgtctaccatcaattgctaagtgatatagaatctctggaggcattgatggacatcttgctatgctaccaaaaattgttctcacaattcattaatgaccatattctttttacgaagacgttcatattcatttacaagaaagttttgaaagaaaaagacgtgcctgcttataatgtgacttcatttatgccattctggaaattttttatgaaaaacttcccttttgttttaaaggtggataacgatttaaggattgagttacaatctgtttacaatgatgagaaattgaaaactgagaagctgaagaatgataaatcagaagtcttgaaggtgtattccatgatcaataattcaaaccaagctgttggacagacttggaattttcccgaggtgtttcaagtaaacatcaggtttctactacacaactccgagatcattgatacaaatacaagcaaacagttccagaaagcacgaaacaatgtcatgcttttgattgccactaacttgaaggagtacaataaatttatgtccattttcttgaaaaggaaagactttactaacaaaaatttaattcaattgatctctctaaaacttctaacttttgaagtgacgcagaatgtgttggggctcgagtatattattcgattattaccaataaacttggaaaataatgacggctcatatggtctgtttttgaagtatcataaagaacaattcataaagtcaaattttgagaaaattttacttacatgttatgaattagaaaaaaaatatcatggcaacgaatgtgaaataaattattatgagatcctattgaaaattttaataacttatgggtcatctcccaaattacttgcaacatctacaaaaatcattatgttgttattgaatgatagcgtggaaaactcatctaatattttggaggatattttgtactactcaacttgtccgtcggaaaccgatcttaacgatattccattgggtagtggacaaccagacaatgacactgttgtaaccaacgatgataaaagtgacgatgatgatcacacagtcgacgaaattgatcatgtagaatattacgttatgatggactttgccaatctttgggttttccaagcgtttacctgtttctgcatcaaaaaaatcatggagaataatgagccagcaatggcaatggaagacttgaagaacttcatattccaaattatcgaaataactaattctaatgatttatgttcacaaatatttgaccaactgaaggatatgcagaccattgagatgataacccaaatagtggagaaagatttctgcacttcttgtttgcaaaacaacaaccaaaagatagatgataattacatcgttgtggtgatcgagattataacgtcattatcgatgaggtttcaaagagaaacttctggtatgatagttatttccatggagaactatcatttactaataaagatcataagacaattaagtgaactgaacgaaggaaatttatctaagagagaaatccaaatagatgccgtcttgaaaatttttagctttcatcaggattccattttccaacgcatcatcgctgatttatcagctgataaacccacaagtccattcattgatagcatatgcaagctgtttgataaaatatcatttaatttaagattgaagctgttcttgtacgaaattttgtcttcattgaaatcattcgccatctattcatccacaattgatgccccagcattccacacaagcggtaaggtcgaactaccgaagaaattgctgaacttaccaccattccaagtgtcctctttcgttaaggaaacaaaacttcatagtggcgactacggggaagaagaagatgcagaccaagaagaatcgtttagtttaaatttaggaatcggcatagttgaaatagcgcacgaaaacgaacagaaatggctcatttatgacaagaaagatcataaatatgtctgcacattttccatggagccgtaccacttcatctccaactataataccaagtacacagatgacatggctacaggcagtaatgatacgactgcgtttaacgattcctgtgtaaacctgagtctttttgatgctcggtttgagaggaaaaatccacattga

SEQ ID NO: 196 - DNA, 4263 bp, Saccharomyces cerevisiae
atgagttctgacgcttccacgtacagacttgaggatgttttatccagcttctatagagtggagaaaatcaaaaagatcaactatcatcagtacatttctaaagcccaaaacgatcaatggtctatccaaatggaattcatgctacggaagcaggatccaaagactctagttgcgctgctttcaagggatttatggtgtttcagtataaatgatgatccggtaccgacacctcctgcgatagaacataaaccagtgagcccagataaaatcggaactttcactgccgattattcaaagccaaacttaccgccacactatgctctttttttaaaagctttaagaaggaaaatttacattaatttggcattaggttcacacaataagctaatacaatttgggaatgcctgcatatcattaagcggagtgccaaattatctcgtacagctagaaccacacctttttgtaaacggagatctcacagtgtcgttatgtgccaagaacatgggattagtaccaatgaaggaggaaaatttggaagaatctttcctttcaaagcatgcgctttatttagcaccatctggaataaggatgcatttggcccctgcttccaagcaaggatacttgataacgccaccaaaacatacagaacttctcttgacgacgttaagtgtatctcatggtataaacttacaaaataaaaaaaatttgaaatgggttgctgttgttcctgacttaggacatctcaacggccacacacctactatagcttcgtatttaactcccttacttgaagcaaagaagctagtatggccgctgcatttaatcttcgcccaaccagtagctgatatagaaaattctacttccggagatccatcagaatttcactgtttgcaagatgctctggatgccattgatgatttcatacaattaaagcaaacagctgcctataggactccaggaagttccggcgtattgagcagtaatattgctggtacaaatcccttaagctcagatggagcatatacagaacagtttcaacattataagaacaactcaattagttctcaacccgcttcttatcattctgtccaagaaactaataagatatctccgaaagatttctcccctaatttcacaggcattgataaattaatgctgtcgcccagcgatcaatttgctccagctttcttaaatacccctaataataacatcaatgagaatgaattatttaatgataggaaacaaactacagtatcaaatgacttagagaacagcccactgaaaacggaactggaggcaaatggtagatcactcgaaaaggtaaataattccgtgagcaagacaggaagcgtagacacacttcataataaagagggaacactggaacaacgagaacagaacgaaaatctgccaagtgataaaagtgactctatggtagacaaggaattgtttggtgaggatgaggatgaggatttatttggcgatagcaataaatcgaattctacaaacgaatcgaacaaaagtatatcggacgaaattaccgaggatatgttcgaaatgtctgatgaagaagaaaataataacaataaaagcattaataaaaataacaaggaaatgcatactgatcttggtaaagatattccattttttccctcatctgaaaaaccgaatatccgtacgatgagcggaactacaaaaagattaaatggaaagaggaaatatttggatattccgatagatgaaatgaccttgccaacgagtccattatatatggacccaggtgcgccactccctgtggaaacaccccgcgatagacgcaaaagtgtgttcgctccactgaattttaaccccataatagaaaacaatgttgataacaaatacaaatctggagggaaattttccttcagtccgttgcaaaaggaggaagcattaaactttgatatttctatggcggatctttctagctctgaagaggaagaggatgaagaagagaacggtagcagcgatgaggatctaaagtcattgaacgtacgcgacgacatgaaaccttctgataacatcagtactaatactaatattcatgagcctcaatacataaattactcttcgatcccaagtctacaagactctattataaagcaagaaaatttcaattcagtaaacgatgctaatatcactagcaataaggaaggcttcaactctatttggaaaattcctcaaaatgatataccacagaccgagtcaccactgaagaccgttgattcatctattcaacccatagaatccaatataaagatgaccttggaagataataatgttaccagtaatccgtccgaatttacgccgaatatggtaaattctgaaatttctaacctaccaaaagacaagagtggtatccccgaattcacaccggcggaccccaatttatcttttgaatcatcaagtagtctaccgtttctattgagacacatgccgctagcatctataccggacattttcatcacgcctactcccgttgttacaatttcagaaaaagaacaagacatcttagatttaattgcagaacaagtcgtcactgattataatatcttaggaaacctcggtattccaaagatcgcctataggggagttaaagattgccaagaaggtttaataacaaccacaatgttacagttattttccactttcgatagattaaatggcaatgatacgatctccaaattctataacatgaagcagccgtacgtttttgtaaagaaacatcacgaactaatcaaagtcaaacacgactctcagccatttattaagttcctcaattttcgccctccaaatggaataaaaaacttcaaatccttattattaagttcatctttcaaagaagattgtctgtcatttgcgccaactctatctcaaacatatattaatcaagagttagggttttgtgagttgcttaaactaactaatgaagacccgcccggactgatgtacttgaaggcatttgataaaaacaagttactgttgttagctgcgcagattgtttcatactgttctaataataagaactccatcaaaaacgtgccaccaatattaataattttacccttggataatgcaactctgactgaattagtagacaaggcgaatatttttcaggtgatcaagaacgaagtttgtgccaagatgcctaacattgaactatatttgaaagttattcctatggatttcattagaaacgtactggtgacagtggatcagtacgtcaacgtagcaatttctatatataacatgctgccgccaaaatctgtaaagttcacccacattgcgcatacgctgccggagaaagtgaatttcagaaccatgcagcaacagcaaatgcaacagcaacagcaacagcaacagcagcagcagaataacagtacaggatcatcttctataatatattatgactcgtacatccacctggcatactcgcgtagtgtagataaagagtgggtttttgcagctctttcagatagctatggacaaggcagcatgacgaaaacgtggtacgtcgggaattccagaggaaaatttgacgacgcatgtaatcaaatatggaatatcgccctaaatttagcgtctaaaaaattcggaaaaatatgtctaattttaactagattgaatggcatactgccggatgatgaattgatgaattggaggagactttctggtaggaatatacatcttgctgtggtgtgtgtggatgacaactctaaaatctccttcatagatgaggacaaattgtaccctagtttcaagccgatctacaaagacactaggtttggaggacgcatggatatgaccagattatacgactatgaaataagggatatagaccaggacatccatggaatagtatttcagcacccgttcccactggcacactcacagcatcgctgtgctattaggagtggtgctttgatcaaattcaaaaaatgcgacggtgatacggtttgggacaaattcgcagtcaaccttttaaactgtccacattctgatagtacacaattgctggaaaccatcttagaagagtttcgcaacctggctgctctaaacgtgtggtacggtctctctgatggcgaagatggccatattccatggcatatcctagccgtgaaaaaaatgatgaacactcttgtgcacaccagagtaaaaattgctaatacttccgccgctactgtgcataccgctacttcttcatcaattattctctcggataaataa

SEQ ID NO: 197 - DNA, 1560 bp, Saccharomyces cerevisiae
atgccctctaccacgctactgtttccgcagaaacatattagggccattccaggcaagatatacgcgttcttcagagagctcgtcagcggagttattatatccaagccagatctaagtcatcattattcttgtgaaaatgcgacaaaggaggaaggcaaagatgcagcagatgaagaaaagactaccacaagtttgtttcccgaatcaaataatatagaccgttctttaaatggtggctgctctgtgatcccttgctccatggatgtcagcgatttgaacacgccaatatcgatcacactatctcctgagaatcgtatcaaatcagaagtaaatgccaagtcactgctcggatcaaggccagaacaagatacaggcgcccctatcaaaatgtctactggtgtcacaagctctccattaagtccatcaggctccaccccagaacattccaccaaggtcttgaacaacggcgaagaggagttcatttgtcactactgtgacgctactttcaggattagaggatatctaacgagacatattaagaagcacgccatcgaaaaggcgtatcactgtccattttttaacagtgccactcctcctgatcttagatgccacaattcgggtggttttagcagacgcgatacttataaaactcatttgaaggcaaggcacgtgctgtaccccaaaggtgttaaaccacaagaccgtaacaagtcgtccggccattgcgctcaatgtggtgaatacttttccaccattgaaaatttcgttgagaatcacattgagtctggggactgtaaagctttaccgcaggggtataccaagaaaaatgaaaaaagatctggaaaattaaggaagatcaagacatctaatggtcattctagattcatatccacttcgcaaagtgttgtagaacctaaagtacttttcaacaaggatgccgtagaggctatgaccatagtggctaataacagttcgggcaatgatattatatccaagtacggaaacaacaaattaatgttaaactcggaaaactttaaagtcgacatacccaagagaaagagaaaatatatcaagaaaaagcagcaacaggtatctggatcgacggtaaccacaccagaggtagctacacaaaacaatcaagaagtggcacctgatgaaatctcatccgccacaattttttcaccttttgatactcatctactcgagcccgtcccttctagttcatcggaatcttccgctgaagttatgttccatggcaagcaaatgaagaattttttgattgacataaacagcttcacaaatcaacagcagcaggcacaagataatccttcgttcctgccactcgatattgaacaatcttcatatgatttgagcgaagacgcaatgtcatatcccatcatatccacacaaagcaaccgtgattgcacgcagtatgataacacaaaaatctcacaaatcttacaatcacaactaaatccagaatatctcagcgaaaatcacatgagagagacacaacaatatttgaatttttacaatgacaactttgggtcacaattttga

SEQ ID NO: 198 - DNA, 3282 bp, Saccharomyces cerevisiae
atgccatttgatgttttgatatcaaaccaaaaagataataccaatcaccagaacatcacgccaatatcaaaatcagttcttttggcgcctcattcaaaccatccagtgattgaaatagctacgtattcagaaaccgatgtatacgaatgctatatacgtgggtttgaaactaaaatagtgatgagaagaactaaagatgattggattaatattacccaggttttcaaaatagctcaattttcgaagacgaaaagaactaaaatactggaaaaggaatcaaatgatatgcaacatgaaaaagttcaaggtgggtatggtaggtttcaaggtacttggatcccactggattcagcgaagtttttagtcaataagtacgaaataattgaccctgtggtcaactccatcttaacttttcaattcgatccaaataaccctccaccaaagagaagcaaaaatagtatattgaggaagacttcgccgggaacgaagataacttctccatcgagctacaataaaacaccaagaaaaaagaacagtagttcatcaacatcggctacaactacagctgcgaataagaaaggcaagaaaaatgcatcgatcaaccagccgaatccaagtcctttacaaaaccttgttttccaaactcctcaacagttccaagtaaattcatcaatgaatataatgaacaataatgataaccacaccacgatgaatttcaacaatgacacaagacacaatttaataaataatattagtaacaacagcaatcaatctactattattcaacaacaaaaatccattcatgaaaactctttcaataataattattcggcaactcagaaacctcttcaattttttccaattccgacaaatttacaaaacaagaacgttgctctgaataaccctaataataatgacagtaatagttacagccataacatcgacaatgtcattaacagcagtaataacaataataatggcaataataataacttgatcatagttccagacggacctatgcaaagccaacaacaacaacaacatcatcatgaatatttgacgaataacttcaatcattccatgatggactccattacaaatggcaatagtaaaaaaaggaggaaaaagctgaatcaatctaatgaacaacaattttacaaccagcaagaaaaaatacaaaggcatttcaaattaatgaagcaacccttattatggcaatcctttcaaaatccaaatgatcaccataatgagtactgtgacagtaacggcagcaacaataacaacaacactgtagcatccaatggctcctccattgaagtattttcatcaaatgaaaatgataacagtatgaatatgtcttcacgatctatgacaccgttcagcgcaggaaatacttcatctcaaaacaagttggaaaacaaaatgacagatcaagaatacaagcagacgatattaacaatactatcatcggaaaggtcttctgatgtagatcaagcgttgttggctactttatatccggcgcccaaaaattttaacataaattttgaaattgatgatcaaggtcacactccactccattgggctacagctatggcgaatattcctttgataaaaatgctaattaccttaaatgctaatgcattacagtgtaataagctcggttttaattgcatcacaaaatcaattttctacaacaattgctacaaggagaatgctttcgatgaaataatatccatcttaaaaatatgtcttataactcccgacgtaaatggaagattgccatttcattatttaattgaattgagcgttaataagtccaaaaatccaatgataataaaatcttatatggattcgataatattgagcttgggtcagcaggactacaatttgttgaagatatgtttgaactaccaagataatatagggaacactccactgcatttatctgctttaaacttgaacttcgaggtttacaacagactggtatatcttggtgcgtcaacagatatattgaatctagataacgaatcgcctgcgtcaataatgaataagtttaatactccggctggcgggtcaaacagcagaaacaacaacaccaaggcagatcgaaagttagctcgaaaccttcctcaaaagaattattaccaacaacagcaacagcaacagcaaccacaaaacaatgtcaaaattccaaaaattataaaaactcaacatcctgataaagaagattctactgcagatgtcaatatagctaaaacagattctgaagtcaacgaaagtcaatacctgcattccaaccagccaaattctacaaatatgaacactattatggaagacttgtcgaatattaattctttcgtgacgtcgtctgtcattaaagatataaagtctacgccgtccaaaattcttgaaaactctcccattttatacagaagaagatcacagtcaatatcagatgaaaaagaaaaggcaaaggataatgagaatcaagttgaaaagaaaaaggatcccttgaatagtgtgaaaactgccatgccatcattggaatcgccttcttcccttctgccgatacagatgtctccactaggaaagtactcaaaaccgctttcgcagcagatcaacaaattaaatacaaaagtttcttctctacaaagaataatgggtgaagaaattaaaaatctggacaacgaagtagtagaaaccgaatcctctatttctaacaataagaagagattgattacaatagcacatcaaatagaggatgctttcgattccgtatcaaacaaaactcccataaattcgatatcagatttacaatcaaggattaaagaaacatcgtcaaagttgaattctgaaaagcaaaattttattcaaagcttggaaaaatctcaagctttaaaactggctacaattgtccaggatgaggaatcaaaggttgatatgaatactaactcaagttcacatccagaaaaacaggaagatgaagagccaattccaaagtcaacgtcggaaacttcttctcctaaaaacaccaaagcggacgccaaattttctaatactgtacaagaatcatatgatgtaaatgagacgttgagactagcaacggaactaactattctacagtttaaaagaaggatgacaacattgaaaataagcgaagctaaaagcaaaattaattcatcggtgaagttagataaatacagaaacttgattggtatcacaattgagaacattgactcaaaattggacgatatagaaaaggatttgagggcaaacgcataa

SEQ ID NO: 199 - DNA, 876 bp, Saccharomyces cerevisiae
atgaactctattttagacagaaatgttagatctagcgaaactactttaattaaacctgaatctgaatttgataattggttgtcggatgaaaatgacggagctagtcatatcaacgtcaacaaggactcctcgtcagttctttctgcatcttcttccacatggttcgaaccattggaaaacattatctcctctgcatccagctcctcgataggctctccaatcgaagaccagtttatatcttccaacaacgaggaatctgctctttttccaacagatcagtttttcagtaatccttcctcatactcgcattctcccgaggttagcagctcgataaaaagagaagaggatgacaatgccctttcgttggcagattttgaaccggcttctttgcaattaatgcctaacatgataaatactgataataatgacgatagtaccccacttaagaatgaaatcgagctaaacgactcgtttataaaaacaaatctagatgctaaggaaacgaaaaagagggctccaagaaaaagactgacccccttccaaaagcaagctcacaacaagattgaaaaacgctacagaataaacatcaacacaaagattgcaagactgcagcagattatcccatgggtagcaagtgaacaaacagctttcgaagtaggtgattctgtaaaaaaacaggacgaagacggcgcagaaactgccgctactactcctcttccatctgccgctgctacaagcacgaagctaaataaaagcatgatcctagaaaaagctgttgactatattctatatctacaaaataacgaacgactatacgaaatggaagttcaaaggttgaaaagtgaaatcgacactttgaaacaagaccaaaaataa

SEQ ID NO: 200 - DNA, 1587 bp, Saccharomyces cerevisiae
atgaattatggcgtggagaagctgaaattgaaatattcgaagcatgggtgtattacttgcaagatcagaaagaagagatgctctgaagataaacctgtgtgccgggactgtcgtcgattaagttttccctgtatctatatatcagaatctgttgataagcagtctttgaaaaaaataaaggcagatatacagcaccagttgatcagcaagaaaagaaagcatgctcctgacagtgctcagaaagcggccgtggccacccgtactcgacgggtcggtagcgacgaacaggataaccaggtatatttgtcaaaaccgctggaagattgcatttctcagaagctggactctatgggattgcagctgtacaactactacaggtctcaccttgcaaacataatttccatcgcgcccatgaaccagaactactatctgaacattttcttgccaatggcccacgagaatgatggtatattgtttgctattcttgcttggtcagctaatcatttgtctatatcatcatcaaatgagctgcgaaaggatgaaatatttgtcaacttggcgaacaagtatacatacatgtcgttatcgcatctaaagacaaacgagggctcaagtgcctgtgctaaactggggtttctatattcactagcacaaatcctaatcttatgtggttcagagatatgtcagggtgatgtgaaattttggaagatattattgaatataggaaaaaatttgatcgaaaaccatgtgggcaaggatgtctcacggatactaaccactactacagaagaaccctccctagaggagaggataatcttccccaatttcaattccgttgttaagtactggctgattgtgaattttatatatcatgatattttgaatttcaatacaacgtccttcccgatcgaacaatacgagaaattcttccaaagggatcagaactctttacccagctcagccaactttattgagtcaatagactcgccaattgaggaaatagaccctttaattggcatcaacaagcctattttactactattgggacaagtcacaaatttgacgaggtttttgcagactatggaacaggaagaaatgctagagcatggcgataaaattttgagtttgcaagtcgagatttataaattacaaccttcgcttatggcgctggaacatttggatgatgaaaagaaattttactatttagaactattcgagataatgaaaatttctaccttaatgttctttcaattaactttattaaagattgacaaagattcgctggaactacagatactgagaaacaaattggactcgaagctagacaaggtcatcggaacttttttggaaggatcgttatgcttcccacttttcatttacggtgtatgcattcaggtagaagatatggagaaaaaaatagatttggaagccaaatttgacgacattttaaaacgatataaatgttacaatttccaaaatgctagattattgatacggaaaatttggcaaaacgaggctgatggcatcagtgagcatgacctggtccacatgattgacgaattagattacaatattaattttgcctga

SEQ ID NO: 201 - DNA, 2511 bp, Saccharomyces cerevisiae
atgctagacaaggcgcgctctcaaagcaaacacatggacgaatctaatgcggctgcctctctgctttcgatggaaacaaccgccaacaatcatcactatttgcacaataaaacatctcgtgccacgctgatgaatagcagccaagacggcaaaaaacatgcagaagatgaagttagtgatggagctaactcccgccatcctacaatttccagtgctagcatcgaatctctcaagacaacctacgatgaaaaccctttgctttctattatgaaatcgacatgtgcgcccaacaacactcccgtgcatactccgtctggttcgccgagtttgaaagtccaaagtggcggagatatcaaagacgatcctaaggaaaacgatactactactacgaccaatactacacttcaagatcgccgtgacagcgataacgctgtgcatgctgccgccagcccactcgcgccttccaatacaccttcggatcctaagtcattgtgcaatggccatgtcgcacaggctacagacccacaaatttccggtgctattcagccgcagtatactgcaaccaacgaggatgttttcccttactcctccacctccactaatagtaacactgccactactactatcgtcgccggcgccaaaaaaaaaatacatttgccgccaccacaagctccagcggtttcttcccccggtaccaccgcagcaggctcgggcgcgggcacgggctcgggcatccgttcccgcacaggatcggatttgccgctcatcattaccagcgccaacaagaacaacggtaagactaccaattcgcctatgtcgatactgagcagaaacaacagtaccaacaacaacgacaataattcgatacaaagctcagattcgagagaatcctctaataacaatgagattggcgggtatttgcgcggcggaactaagcgcggcggcagtccatctaacgactctcaggtccagcataatgtgcatgatgaccaatgtgccgtgggcgtggcgcccaggaacttctatttcaacaaggatagagagataacagacccaaatgtaaaactggacgagaacgaatcaaaaatcaacatatcgttctggctaaattcgaaatacagagatgaggcttattctttgaatgaatcatcctccaacaatgctagttcaaacacggatacgcctacaaactctcgacatgcgaacaccagctcttccattaccagcagaaacaatttccagcattttaggttcaaccaaataccttctcaacctccaacttccgcatcttcgtttacaagcacaaacaacaacaaccctcaacggaacaatatcaatcgcggtgaagacccgtttgccacttcgtcaagaccttctactgggtttttttacggcgatttgccgaatcgtaacaatagaaatagtcccttccatacaaatgaacaatacatcccaccacctccaccgaaatacatcaattctaaattggatggattgagatcaagattattgctcggtccgaattctgcatcttcatctaccaaactagacgacgacttgggtacagcagcagcagtgctatcaaacatgagatcatccccatatagaactcatgataaacccatttccaatgtcaatgacatgaataacacaaatgcgctcggtgtgccggctagtaggcctcattcgtcatcttttccatcaaagggtgtcttaagaccaattctgttacgtatccataattccgaacaacaacccattttcgaaagcaacaattctacagctgtttttgatgaagaccaggaccaaaatcaagacttgtctccttaccatttaaatctaaactctaaaaaggttttagatcccacttttgagtcaaggacaaggcaagttacttggaataagaatggtaagcgaatagacagacgcctttctgctccagaacaacaacagcaactggaagttccaccattgaaaaaatcgagaaggtcagttggaaacgcaagagtagcaagccaaaccaatagcgattataattctcttggcgaatcctcaacttcgtcagctccatcgtctccatctttgaaggcttcttctggcttggcatataccgctgattatcctaacgctacttcgccggatttcgctaaatctaaaggaaaaaatgtcaagcctaaggcaaaatcaaaggcgaaacagtcatcaaagaaaagaccaaataatactacttcgaaatcaaaagcaaacaattctcaagaatcgaataatgctacttcctcaacgtctcaaggtacaaggtcccgtactggttgctggatttgtagattaaggaaaaagaagtgtaccgaggaaagaccgcactgtttcaactgtgaaaggttgaaattggactgtcactatgacgcgttcaaaccagattttgtatctgatccaaagaaaaaacagatgaaactggaggaaatcaagaaaaaaacaaaagaggccaaaagaagagcaatgaaaaaaaaataa

SEQ ID NO: 202 - DNA, 1158 bp, Saccharomyces cerevisiae
atgtcacaagaaacaaaaatgctaccttctctatctagtcttctatcgggaaccgaaatctcgtccagccccgtatcaccaagcttcactaatccaagaacgagttttcacctcgatgatcgcggaaccataaaattaccaccgctaaacaccagtatcaatcgtccaagatctgtggaaagcgccttgagacacactgttacatccttgcatgaaaatagcagcgcttatggtgatgacatgctcaagcacacgcaatcagactcagccctctcatctcagttgaatagttctcaagaaacagttgatgaatcacacgaaaaccttctactgactcccctaaatagcaaaaagagagattattcggtttcttcaaagaaaaacgacatattaacaccactctctgcagcgaagtcgattattatcccctctgcctctaaggaaaaaagacgtgcatttgctttcatcacacactcgcaggagaccttccctaagaaggagcctaagatcgacaacgctccactagcacgccgaaagagaagaagaacctcgtcccaggaactatctattcttcaggctgaatttgaaaaatgtcctgctccatcgaaggagaaacgaattgagttagctgaatcttgccatatgactgaaaaagccgttcaaatatggttccagaataaaagacaagcggttaaaaggcagagaatcgccacttcgaagtcaaccactataatacaaacggtatctccaccatctccgcctctggacgttcatgctacgccactagcatccagagtcaaggcggacatacttcgtgatggaagctcatgttctcgttcttcctcttcttcaccgctggaaaatacgccgccaaggcctcatcattccctaaataggcgctcatccacaccaagcataaagagaagccaggctttaacattccatctaaacccacaaaagaagacgttgactcccgtgaaaacgtctcccaacagcagagtaaataaattgatcaatagcatagatcattctccatccaaagccaagcgtccggtaagcaatccctccggctcccctaaaaggaagagaaaattcggattcaagatcgtcgatcaacaaccgttgaaggatcttgatccgaacgctttccgtggttga

SEQ ID NO: 203 - DNA, 897 bp, Saccharomyces cerevisiae
atgagcggtgaattagcaaattacaaaagacttgagaaagtcggtgaaggtacatacggtgttgtttataaagcgttagacttaagacctggccaaggtcaaagagtagtcgcattgaagaaaataagactagagagtgaagacgagggtgttcccagtacagccatcagagaaatctcattattgaaggaattaaaagacgataatattgtcagattatacgatattgttcactctgatgcacacaagctatatcttgtttttgagttcctcgatttggacctgaaaagatatatggagggtattccaaaggaccaaccgttaggagctgatattgttaagaagtttatgatgcaactttgtaagggtattgcatactgccactcacaccgtattctgcatcgtgatttaaaaccgcagaacttattgattaacaaagatgggaatctaaaactaggtgattttggcttagcgcgtgcttttggtgttccgttgagagcttacacacatgaaattgttactctatggtatagagctccggaggtattactgggtggaaaacaatatagtacaggtgtcgatacatggtccatcggctgtatatttgccgaaatgtgtaacaggaaaccaatcttcagtggcgatagtgagatcgatcagattttcaagatattcagagtattgggaacgccgaatgaagctatatggccagatattgtctacttgcctgatttcaagccaagctttcctcaatggcgcagaaaagacctatcacaagtggtaccaagtctagatccacgcggtattgatttgttggacaaactcctcgcgtatgaccctattaaccggattagcgccagaagagcagccatccacccctacttccaagaatcataa

SEQ ID NO: 204 - DNA, 738 bp, Saccharomyces cerevisiae
atggctctacctctgataaaacctaaggagtctgaggaaagccacctcgctcttttgtccaagatccacgtgtccaaaaattggaaactgcctccaaggttgccccatagagcagctcagcggaggaaaagagttcatcgacttcacgaagattacgaaactgaagaaaatgatgaggagctacagaagaaaaaacggcagaatagagacgcccaaagggcctacagagaacgcaaaaacaacaagttgcaagtgctggaggaaaccatagagtcactgagtaaggtcgttaaaaactacgaaacgaaactaaaccgcctccaaaatgaacttcaagcgaaagaatcggaaaatcatgcccttaaacagaaattggagacccttactctgaaacaagcctctgtgcctgctcaggaccctatcctgcagaatttgatcgagaatttcaaaccaatgaaggcgatacctattaagtacaataccgctatcaagcgccaccagcactcgacagaactgcctagctctgtcaaatgcggcttttgtaacgacaacactacttgcgtttgtaaagaactggaaacagatcaccgtaaaagtgacgacggtgtggccacagaacagaaggatatgtcgatgccacatgcagagtgcaataataaagataaccccaatgggctctgtagtaattgtactaatatcgacaaatcatgtatcgacatccggtccatcatccactga

SEQ ID NO: 205 - DNA, 1152 bp, Saccharomyces cerevisiae
atgcaaaaccctccgttgattcgtcccgatatgtataatcagggaagcagctcaatggctacttataatgcctctgagaagaatctaaatgagcatccttctccgcaaattgcacagcccagcacgtcccaaaagttaccttatagaataaatcctacaaccactaatggggacaccgacatatctgttaacagcaatcctatccagcctcctttgccaaacttgatgcatctatctggtccgtctgactatagatcgatgcatcaaagtcctatacatccatcttatatcatccctccgcattcaaatgaaagaaaacaatcagcttcttacaacagacctcaaaatgctcatgttagtattcaaccttccgtggtattcccccctaaaagttattccatatcttatgcaccttatcaaataaatccccctttaccaaatggacttccgaaccagagcatatctttgaataaggagtatattgcagaggagcaactatcaaccctcccatctcgcaataccagtgttactactgcacctccttcttttcaaaacagtgctgataccgctaaaaattcagctgataataatgataataatgataatgtaaccaaacctgttcctgataaagacacccaactcataagtagttcaggcaaaactttaagaaatactagaagagctgctcaaaatagaaccgctcaaaaggcatttagacaaaggaaagaaaaatacatcaagaatctcgaacaaaaatcaaagatatttgacgatttactagcagaaaataataacttcaaatcattaaacgattcattaagaaatgacaacaacattttaatagctcagcatgaagctataaggaatgcaattactatgttaagaagtgagtatgatgtcttatgtaacgaaaacaacatgttgaagaatgagaatagtataataaaaaatgaacacaacatgtcaagaaatgaaaatgaaaacctaaaacttgagaataaacgcttccacgctgaatatatacgaatgatcgaggatattgaaaatactaaaagaaaggaacaagaacaacgagatgaaatagagcaactaaaaaaaaaaataagatccctggaggaaatagtagggagacactcggatagtgccacgtaa

SEQ ID NO: 206 - DNA, 1764 bp, Saccharomyces cerevisiae
atgtttactggtcaggagtatcattccgtagactctaattccaacaagcaaaaagacaacaataaacgtggtattgatgacacatcaaagatcttgaataataagataccgcactctgttagtgatacttctgccgccgccaccaccacttctactatgaacaattctgctttaagtagatccttagatcctactgacataaactatagcacaaatatggctggtgtggttgaccaaatacatgattatactacttccaatagaaattctttaaccccacaatattctattgcagctggaaacgtcaattcgcatgatcgggttgttaaacccagcgccaattcaaactatcagcaggctgcataccttcgacaacagcaacagcaggatcagcgacaacagtcaccctctatgaaaactgaagaggaatcccaactctacggtgatattctgatgaattctggtgtcgtacaggatatgcatcagaatctggccactcatacaaatctgagccaactgtcgtctacccgtaagtccgctccgaatgattctactacagccccgactaatgcgtccaacatcgccaatacggcttctgtgaacaagcagatgtatttcatgaacatgaatatgaataacaacccacatgccttgaacgatccatccatcctggaaacattgtcgccattttttcaaccttttggtgttgatgtagcacatttacctatgacgaatccaccaattttccaaagttctttgcctggatgcgatgagccaattagaagaagaagaatatcaatctctaacggtcaaataagccagctaggcgaagatattgaaactttggaaaacctgcacaacacacagccgcccccgatgcccaattttcacaattataatggtctgagccaaactaggaatgtatcaaacaagccggtcttcaaccaagcagtgccggttagtagtattccacaatacaatgcaaaaaaagttattaatcccacgaaggactccgcattgggtgatcagagcgttatttactcgaaaagtcagcagcgaaattttgtaaacgcgccatcaaagaatactccagcggagagtataagtgatttggaaggcatgacgacgtttgcgccaactactggaggtgaaaataggggcaaatctgcacttagggaatctcactctaatcctagcttcactccaaaatctcaaggatctcatttaaatttagcggcgaacacacagggaaatccaatccctggtactacggcatggaagagagcaagattgttagaaagaaatcgaattgcagcttcgaaatgtagacaaaggaaaaaggttgcgcagctgcagctccaaaaggaatttaacgaaattaaagacgagaatagaattttactgaaaaagttaaattactatgaaaaactaatctctaaattcaagaaattctccaaaattcatttacgtgaacatgaaaaactaaataaagactcagataataatgttaatggcactaatagtagcaacaaaaatgaaagcatgactgtggattcattaaagatcattgaagaacttttaatgatcgattcagacgttacagaagtggataaagatactggtaagatcatagccatcaagcacgagccatactctcaacgtttcggaagcgatactgacgatgacgatatagatctcaagcccgtagaaggtggtaaggatccagacaaccaatcattacccaattctgaaaagataaaataa

SEQ ID NO: 207 - DNA, 2811 bp, Saccharomyces cerevisiae
atggatggggaaatggcaataatagaaagcagcaatcatgtcgggacttcatcgcctaccactgaaacacagtttactatagattcttccgcattgaaagaccaagaaaccaaagaaagcataacaaattcaccgacaagcgaggtaccgattgaaacaaaactaccaaaaagttctgatatagtaacagaggaaaaacatcctcaaaacacgactactgatattgaaaacgaggtagagaatcctgttacagacgataatggaaatttgaaacttgaattacctgataaccttgataacgctgatttttcgaagctactggaatttgatgcaaaaaatgatgaagctctgttcaactcaaatgagttgttatcccacaccatggatcctgtaaataacatcgatttaactcatgatcacagcagggaggtttcatcaaaagaagatatcaatatagagccagtaaaccctgatgaggacgaaagggagaaaactcaagataacacagcagcagtgaaaactgaaggcataaggaactcagaagatacaagtatacaaaaggatgaacccactgctgatgctatatacacagatgtgcataaattatcagtaaacaaagataccgagaccctaccaacattagtagatgaaaaaaacaacatgctgcatatgagaaacaattcaataacgccaataatgtttcagcagcatgaattagtgggacaaccgccacaaaacactgtaacggaaaataatagtacagatgctgaaactacccaacgaaaactatctgagccaatcgatgcaagtttaccgctaccgaatgaacaaccgactatcttcgcctatgcaaggctggactttcaaagtttcacattttatgtacaaacattacatgcaataatcggaaggaggtctgagaatgacttctcccacaaagttgacgttaatcttggtccttcaaaatcaatatcgaggagacacgcccagattttttacaattttgggacaggaaggttcgaattgtccataatagggaagaatggtgcttttgtggatgacattttcgttgaaaaaggaaatactgtgccacttcgtaataagacaaaaattcaaattggacaaattccatttcaatttattttaccagaacaagaacgtaacgacgatagcaaaagcccagaaaacgctgacatagcagaatctgaaataaatacaagaaatctcaaaaaaaacgagcccaaatctaagaaaaagattacaactggagcaaagcccaagaaagcgcagaccaaaccagctgttaagaaagaaaagaagccaccgaaaataccaaagaaagtatatactttggaggagattccagtagaatatagaacgaaacctactgtatcttactctgctatgctaactacttgcatacgaaagtactcgactgccaagggaatgtctttatctgaaatttatgcaggaataagagaactcttcccctattataaatactgtcctgatgggtggcaaagctcggtaagacacaacttatcgctaaataaatctttcaggaaggtttctaaagaaggcaaaggatggttatggggtcttgatgaagaatatattgcagagagggaacgacagaaaaagaaacaaagtgagatagctgtggcaaaggcacaagctgcacaattaaaacttgaacagcaacagcacaaacttcagcaagtgccgcagaggggcaaaaaagatattgtttcgcagagatctaacgttaatgcgagaaaacaaaacatctcacaaactcttgcagcaaacagagccgcctcgaacaggaaaaatacagcaagtgataatcaaaggacaatgaaatatctgcaggaacagcttgtcattttaacacgagatagaaagggtttatcgaagcaggtcatcgctgcaattttgacgcaggctctagctatgacaataaatcaggttacacaagcggcaaaaaacaaggggattactggtaatccacttacagccttgatggacaagaatcctcagcatttgaatctaattttagcagctgctgtaaacgcggcaactgcaaaagtcacaaaaggtgaggtaaagcaattagtgaaccctgaaactacagcggcggcggctttagcagctaaggcacagcattccaaaccgatacgccaaccaatagtccagacgccgcatgtaccagataggcctccatctcagttatctgcgtcggcatcatcccatcccaataattacttgcatgataaacaaccgggatcgtttgatccttcgtccttgtctcgattttttcaaccgagacaaaatgctagggctacatcctctgtggcagctacgtcagttccggcggctgcttctcaaaatgttgatgcacaacccaaacctaagcctgcacaggacaacgacttagaaagtgaaagcggcactagtagtagtagcagttccagtagtgagagcggaagcgagagcgatagtggtagcgatgacggtagtgctagtggaagcggcgataatagcagcactagtagtgaaagcgaaagcgaaagtgatagtggaagcgaagtagatgaaaagaacaacaaaaacgaaaagatcgatagtgaaagtattaaaaacaacgaatctaaagatgatattccatctaaagacgagaatagtagcaatgataatcgcgagatttcaaaaaccgacgaagaaggtcatgattctaaaaggcggaaggtcagcgaggatatcaacgagggtatcactgaagtaaatgtatcccttgaggaaaaactttaa

SEQ ID NO: 208 - DNA, 846 bp, Saccharomyces cerevisiae
atgtccgaatatcagccaagtttatttgctttaaatccaatgggtttctcaccattggatggttctaaatcaaccaacgaaaatgtatctgcttccacttctactgccaaaccaatggttggccaattgatttttgataaattcatcaagactgaagaggatccaattatcaaacaggataccccttcgaaccttgattttgattttgctcttccacaaacggcaactgcacctgatgccaagaccgttttgccaattccggagctagatgacgctgtagtggaatctttcttttcgtcaagcactgattcaactccaatgtttgagtatgaaaacctagaagacaactctaaagaatggacatccttgtttgacaatgacattccagttaccactgacgatgtttcattggctgataaggcaattgaatccactgaagaagtttctctggtaccatccaatctggaagtctcgacaacttcattcttacccactcctgttctagaagatgctaaactgactcaaacaagaaaggttaagaaaccaaattcagtcgttaagaagtcacatcatgttggaaaggatgacgaatcgagactggatcatctaggtgttgttgcttacaaccgcaaacagcgttcgattccactttctccaattgtgcccgaatccagtgatcctgctgctctaaaacgtgctagaaacactgaagccgccaggcgttctcgtgcgagaaagttgcaaagaatgaaacaacttgaagacaaggttgaagaattgctttcgaaaaattatcacttggaaaatgaggttgccagattaaagaaattagttggcgaacgctga

SEQ ID NO: 209 - DNA, 2661 bp, Saccharomyces cerevisiae
atggaaggaagatcagattttgtggcgacttcacagtccggaagtgaaatgagccatagtgaaactaggaatagaactgggatgaatgctaggaaaaggaaattcgcctgtgtggaatgtcgtcagcagaagtcgaaatgtgatgctcacgaaagagcaccggagccatgcactaagtgtgctaaaaagaatgtcccatgcattttaaaacgagatttcagaagaacttataaaagagcaaggaacgaagccattgaaaaaagattcaaggaactcaccagaactttgacaaatttaacttcggatgaaattttgaagaaaattgaagaggaacaggaaattgttttggataacagtaatttcacaaaagaaaaagtaaaacaactcaggaagagtgcttttgagacgacagaaatagaaccgagatcatacaaaacacttcgaggagaacctatttcttacagtaccaacagaagacatacggattcttctcctttaacgctcttaagctcgtcgacaaacttcgaccctgttcactcaacaaacgttatgacagatgatcaacttaagtgcttgccaaaaagcctgggcgacgtatatttgtcaagcagcgatattgctgagctgtttcaagaatttgcgacaaaatatcatcaatttttacccgtcgttgacctttcgaaaggagcagagcgaatttatcacttatctccttgcttattctgggtcatcctgctcattggtttaaggcggaaatttggggctacagacttaatgactcgattatcagtgctagtaaagtcagttttatcagaaatcacaatatctccaataattcgatatactccatcagataaggacgaacccgttctaaatgtagcatctgtatattccgtgcaagcatttcttttatacacgttctggcctcccttaacctcttcattaagcgccgacacttcgtggaataccataggaacagcgatgttccaagcgcttcgggtaggactaaattgtgcaggtttttcaaaagagtatgcttcggcaaattcagaattagttaacgagcaaatacgaacttggatttgctgcaatgttgtatctcaaacagttgcatcatcatttggtttcccagcttatgtttcatttgattatttagtaatcagctctattagagtaccaaattcaaaaagccaagtagatatacccaatgaactaagacaaatggctcaaattgctagatttgagaaccaaatcgtaaacacaatgaactccaccccggcgagtgttactgggatggtaagtcaggaagagaagcagcccttgttacacgttcttaatcaacaactaagtcaattggagattagtcttgaagaaaataacctagatgatatccgaaaatttttattactagtggccaaggttcacttattaacctattacttcactgatgttacctcccaaagtgctggaaaatcaaatggtaatatttatgagggatcatattccattatggaactcgatacaagttttgaaacgaaacgtggattggtgaaagtttataatgccgccgtaaactttcttatacatgccaatagtatgtgggaacatgatcctaccattattaagtactttcctggtttgtttgtcttgaatatatggcaatctgcctgtattattagtaaactcatacattcatcacttcattcaatgctagatgttaactcaggcaaaaaagcttataacaacgcaatttcattgacgtttaatgcctcagttttaaaatatgatatggcgtacagatcatccggaataatgcgaagcatatggagtttatttgctaatatgtatgatgcctggaaaaacgaccaaaaggaaggtggaggtagactaaataatgatttcaatttaggcatcaccataaaatctaggatgtcagtaaacgttttttttgactgcttatatattctaaaagagaaatgtggtatggccaaattggagagagagaccaaggtttctacagcttacaatgttgatgaagaggaagaggaagatgaagatgaggagggagaagaagaagaagaagaagaagaactaagtagtaaagttccagaaaatatggatagccagcaactaaggacaaggaaattcaccaatgtaaggcatccagaaaagaaagcaagaaaaataattgaaacaattccgctagacccaaatccaataaatgcaggctctaccagcagtggaagctcattaacgaccccaaatagtcaagtagcgaacactatatcatatagaggaatcctcaataaaatgtcacctagggaacaactgaatcatgcaaatttagattccagtgtttctacagacatcaaggacactgaagctgtcaatgaacctctgccaatagggaggaatgctgaacatccggcaaatcaaccgcctctttcaataacacaaatgcaagaaaacacactacctgcgacacaagccaactcttctctattagaaacgtatcccattgttcaatcaaaccccgttacaactacaatcaaagaatcacccaattccatcatggcaggttgggataactgggaatctgatatggtttggagggatgttgatattttaatgaatgaatttgcgttcaatcccaaggtttaa

SEQ ID NO: 210 - DNA, 534 bp, Saccharomyces cerevisiae
atgaaactggcgcaagacatgaatgtagatgaaatatttctcaaacaagcggcagaagctatagcggtaatctcatcaagtcccactcatacggaccccataatacgagagctactccacagaattcgacaatccagcccattgagcgcagttataccagcaccagaaaatgttttaaaggctggggagccggaaaatatggctagaggtcttataaggattccagaaacacaaacaaaaagaacaggaggtaacaaccatagcaaggaaggcgcacagctctacagctgtgcgaaatgtcagttgaaattcagcagaagttctgatctgagaagacatgaaaaggtacactcactcgtgctgccgcatatttgctcaaactgtggcaaagggtttgccaggaaggatgctctaaaaagacattctaacacactgacctgtcaaagaaacagaaagaaactaagtgaaggttcagacgttgatgtagatgagctcatcaaggatgcgataaagaatggtaccggcctgttgtaa

SEQ ID NO: 211 - DNA, 1233 bp, Saccharomyces cerevisiae
atgagtacagccgatcaagaacaacccaaagtggtggaagcgacaccagaagatgggacagcttcctcccaaaagtcaactataaacgctgagaatgaaaatacaaaacaaaatcaaagtatggaaccccaagaaacttcaaaaggtacctccaatgatactaaagacccagataacggagaaaagaacgaggaagccgcaatagacgaaaatagtaacgtagaagctgcagaaaggaaacgtaagcacattagcacagatttctcagatgacgacctagaaaaggaggagcataatgatcagagtcttcaaccaacggtggaaaatagggctagtaaagatagagattcaagtgctactccaagtagtagacaggaattggaagaaaaactggaccgtatattgaaaaaaccaaaggttagaagaacgaggagggatgaagacgatttagaacagtacttggatgaaaaaattctaaggcttaaagacgaaatgaatattgcagcacagttggacatcgatactttaaataagagaatagaaactggagatacttcgctgattgccatgcagaaggtcaaattgttgccgaaggtggtaagcgtactgtcaaaggcaaacttggcagacaccattttggataataacttacttcaaagtgtcagaatatggttggaacccttacctgatgggtctctgccatcttttgagattcaaaagtcactctttgcagctttaaacgatctaccagtgaaaactgaacacctgaaggagagtggtttggggagagtagttatcttttatacaaagtccaagcgtgtcgaagctcaactagctaggttggctgaaaaattaattgcggagtggacaagacctattattggtgcttcagataactacagagataagagaataatgcaattagagtttgattctgaaaaattgagaaagaaatccgttatggattctgccaaaaataggaaaaagaaatctaagtctggtgaagatcctacctctcgtggttcttcggtacaaaccttgtacgaacaagctgctgcaaggagaaacagggctgccgcaccagcacaaaccactactgattacaagtatgctcctgtgagtaaccttagcgcagtacctacaaacgcaagagcagttggtgttggttccactttaaacaatagtgagatgtacaagaggttgacttcaagattaaacaagaagcataaataa

SEQ ID NO: 212 - DNA, 4356 bp, Saccharomyces cerevisiae
atggaagagacgggagattcgaagctggtccctagggacgaggaagaaatagtaaatgacaacgatgaaactaaagcgcctagtgaggaagaagaaggagaagatgtctttgactcctctgaggaagacgaagatattgatgaagacgaagatgaggcaagaaaagtgcaagaaggcttcattgtcaacgatgatgatgaaaatgaagacccaggaacaagtatttccaaaaaaagaagaaaacataaaagaagagaaagagaagaagatgatcgactatccgaagatgatttggatttgttaatggagaatgctggtgttgaacgtaccaaagcgagctcctcttcaggaaaatttaaaagattaaagagagtaggagatgaaggaaacgctgcagaatcagaaagtgacaacgtcgctgcatcaaggcaagattctacgtctaaattggaagatttcttttctgaagatgaagaagaagaagaatctggtttacgcaacggtaggaacaatgaatatgggcgtgatgaagaagaccatgaaaataggaacagaacagctgacaaaggtggaatcttggacgaattggatgatttcattgaagatgatgaattttctgatgaggacgacgaaaccagacaaaggaggatccaagaaaagaagcttttaagagaacaatccatcaaacaacctacacagattactggtctatcgtcggataagattgacgagatgtatgacatttttggtgatggtcatgactacgattgggctttagaaattgaaaatgaagaactagaaaatggtaacgacaacaatgaagctgaagaagaagagatcgatgaagaaactggtgctataaaaagcaccaagaaaaagatatctctacaagacatttatgatttagaggatttgaaaaaaaacttgatgactgaaggagacatgaaaattagaaagacagatattccagaaagatatcaagaattaagagcaggtattactgactacggaaatatgtcatcggaggatcaagaattagaaagaaactggatagcagaaaaaatttctgtggataagaacttcgatgccaattatgatctcactgaatttaaagaagcaattgggaacgcaatcaaatttatcaccaaagaaaacttggaagtcccttttatatatgcttaccgtcgtaactatatttcctcaagagaaaaagatgggtttcttttgactgaagatgacctttgggatatagttagccttgacatcgaatttcacagtcttgtgaacaaaaaggattatgtccagagattttatgcagaattacatatcgatgatcctattgtcactgaatacttcaaaaatcagaatactgcatctattgcggaactgaattctctacaggatatttatgactacctagaattcaaatatgccaacgaaatcaatgaaatgtttataaaccacactggaaagactggtaagaaacatttgaaaaattccagttatgaaaaatttaaagctagtcctctttatcaagcggttagtgatattggtatatcagctgaggatgttggtgaaaatatcagttcccagcatcaaatccaccctcccgtagatcatccaagttccaaaccagtagaagtgatagaatctatattgaatgcaaacagcggtgatttgcaagtctttacgtccaatactaagctggcaattgatacggtccaaaaatactactctttggaattgtctaaaaatacaaaaataagggaaaaagttagatccgatttttccaaatattatctggctgacgttgtgttaactgctaaaggtaaaaaagaaattcaaaagggatctctgtatgaggacataaaatatgccatcaatagaactccaatgcacttccgtagggatccagacgtttttttgaaaatggtcgaggctgagtctttgaacctgctcagtgttaagttacacatgtcgtcacaagcccaatatatagagcatttattccaaattgcacttgaaactaccaatacctcggacatcgcaatagaatggaataacttccgtaaactggcattcaaccaagcgatggacaagattttccaggatatatctcaagaagtcaaagacaatttaacaaaaaattgtcaaaaattggtagccaagactgttcgccataagtttatgacaaaattagaccaggctccattcattcctaatgtcagggatccaaaaattccaaaaatcttatctttaacctgtggacagggtagattcggagccgacgctataattgctgtctacgtcaacagaaagggtgattttataagagattacaagattgtcgacaatccatttgataagacgaatcctgaaaaatttgaagacaccttggataatatcattcaaagctgtcaaccgaatgccatcggaatcaatggccctaacccaaagactcaaaaattttacaaaagattacaagaagttctacataagaagcaaatcgtcgacagtagaggacatactattccaatcatttacgttgaggacgaagtcgctatccgttatcagaattccgaaagagctgctcaagaattccctaataaacctcctctagttaaatactgtatcgccttggcgcgctatatgcattccccattgttggaatatgctaatttaacaagtgaagaagtgagatcattgtcaattcatccacaccaaaatctgttatcctcagaacaattgagttgggctcttgaaaccgctttcgttgatattgtcaacctggtaagtgttgaagttaacaaagccacagataataattactacgctagtgcgctgaaatacatctctggctttggaaaacgtaaagctattgatttcttacagtcccttcaaaggctaaatgaaccattactggctcgtcaacaattaattactcataacattcttcacaagactatttttatgaattccgcgggattcctctatatctcatggaatgaaaaaagacaaaaatacgaagatttggaacatgatcaactagatagcactagaattcatccagaagactaccatttggccaccaaggttgccgctgatgctttagaatacgatcctgatactattgccgaaaaagaagaacaggggactatgagtgaattcattgaactgttgagagaagatcctgaccgtagagctaaactagaatcactaaatctagaatcatacgcagaagaacttgagaagaataccggattaagaaaacttaataatctaaatacaattgtccttgaattgttggatggatttgaagaattgagaaatgactttcatcctttgcaaggtgatgaaattttccaaagtttgactggtgagtctgaaaagacgtttttcaagggtagtattattccagtcagagtagaaagattctggcacaacgatataatttgcactacaaactctgaagttgaatgtgtagtaaatgctcaacgtcacgcaggtgcacaattaagaagacctgcaaatgaaatatacgaaattggtaaaacatatccagcaaaggtgatatatattgactatgctaatattactgcagaagtttccttattagatcatgatgtcaaacagcaatatgttccaataagctacagtaaagatccttccatttgggacttgaaacaagaactggaagatgccgaagaggagaggaaattgatgatggcagaagcccgtgcaaagagaacacatcgtgttatcaatcatccttactatttccctttcaacggcagacaggctgaggattacttaaggagtaaagaacgtggtgaattcgtgatcagacagtctagccgaggtgatgaccacttggttatcacctggaaattggataaggatttgtttcaacatattgatatccaagaattagaaaaagaaaatcctttggctttaggtaaagtcttgattgtcgacaatcagaaatacaatgatttagaccagatcattgtagaatatcttcaaaacaaggtaaggctcttgaatgaaatgacatctagtgaaaaattcaaaagcggtactaagaaagatgtggtcaagtttattgaagactactctagagtgaatccaaataagtctgtgtactatttcagtttgaaccacgataaccctggttggttttacttgatgttcaagattaacgcaaatagcaaattatacacatggaatgtgaaattaacgaacactggttatttcctggtaaactacaattatccaagtgttatccagctttgtaatggttttaagacgcttctaaaatctaacagtagtaagaatagaatgaacaactaccgttag

SEQ ID NO: 213 - DNA, 1308 bp, Saccharomyces cerevisiae
atggtggtgaacacgatatatatcgcaaggcatggatacagatccaactggcttccggagggtccatatcctgacccacttacaggaattgatagcgatgttcctttagcagaacacggagtccagcaagccaaagagttggcccattaccttttgtccttggataatcaaccagaggccgccttcgcttctccattttatagatgtcttgagactgtacaaccgatagctaagctgttagaaatacctgtttatctagaaaggggtatcggggaatggtatagacctgatagaaaacctgttattccagtacctgctggatatgagatactaagcaaattttttccaggtgtcattagccaagaatgggactctacattaacaccaaatgaaaagggtgagacagaacaggagatgtatatgagattcaaaaaattttggcccttatttattgaacgtgtagaaaaggaatatccaaatgttgagtgcatactgttggtcacacacgctgcatctaagattgcccttggaatgagcttgctgggatacgataatcctcggatgtctttgaatgaaaatggtgataaaataagaagtggtagttgctcattagacaaatacgaaattcttaaaaaaagctacgatactatagatgaaactgatgatcaaacatcctttacctatataccatttagtgacagaaaatgggttttaacgatgaatgggaataccgagtttttgagtagtggtgaagaaatgaattggaattttgattgtgtggcagaagctggttcagatgctgatatcaaaaagagacaaatgacaaaaaaaaccagctcaccaataccagaagcagatgatcaaacggaagtagaaaccgtttatatcagtgttgatattcccagcggcaattacaaagagaggaccgagatagcaaagagcgcaattttacaatattccggtttagaaacagatgctccgttgtttagaatcggaaatagattgtatgagggaagctgggagagacttgttggcacggagcttgctttcccaaatgctgcacatgtacataaaaagacagccggtctactatcaccgactgaagagaatgaaacaacaaatgctggtcaaagtaaaggctcatcgactgccaacgacccaaacatacaaatacaagaagaagacgttggactaccggattcaactaacacaagtagagatcacacgggagataaagaagaggttcaatcagaaaagatttatagaataaaagagaggatagtgctaagcaatgtccgccctatgtaa

SEQ ID NO: 214 - DNA, 2142 bp, Saccharomyces cerevisiae
atgactgccagcgtttcgaatacgcagaataagctgaatgagcttctcgatgccatcagacaggagtttctccaagtctcacaagaggcaaatacctaccgtcttcaaaaccaaaaggattacgatttcaaaatgaaccagcagctggctgagatgcagcagataagaaacaccgtctacgaactggaactaactcacaggaaaatgaaggacgcgtacgaagaagagatcaagcacttgaaactagggctggagcaaagagaccatcaaattgcatctttgaccgtccagcaacagcggcaacagcaacagcagcaacaggtccagcagcatttacaacagcaacagcagcagctagccgctgcatctgcatctgttccagttgcgcaacaaccaccggctactacttcggccaccgccactccagcagcaaacacaactactggttcgccatcggccttcccagtacaagctagccgtcctaatctggttggctcacagttgcctaccaccactttgcctgtggtgtcctcaaacgcccaacaacaactaccacaacagcaactgcaacagcagcaacttcaacaacagcaaccacctccccaggtttccgtggcaccattgagtaacacagccatcaacggatctcctacttctaaagagaccactactttaccctctgtcaaggcacctgaatctacgttgaaagaaactgaaccggaaaataataatacctcgaagataaatgacaccggatccgccaccacggccaccactaccaccgcaactgaaactgaaatcaaacctaaggaggaagacgccaccccggctagtttgcaccaggatcactacttagtcccttataatcaaagagcaaaccactctaaacctatcccacctttccttttggatctagattcccagtctgttcccgatgctctgaagaagcaaacaaatgattattatattttatacaacccggcactaccaagagaaattgacgttgagttacacaaatctttggatcatacttcagttgtttgttgcgtgaagttcagtaacgatggtgaatacttagccacaggctgcaacaaaactactcaagtgtatcgcgtttcagatggttctctggtggcccgtctatctgacgattctgctgccaataaccatcgaaattcgatcactgaaaataacaccaccacgtccacggataacaatacaatgacaaccactactaccaccacaattactaccacagcgatgacttcggcagcagaattggcaaaagatgtggaaaacctgaacacttcgtcttccccatcatccgacttgtatatccgttcagtgtgtttttctccagatgggaaatttttggcaacaggtgctgaagacagactgattagaatttgggatattgaaaatagaaagattgttatgattcttcaaggccacgaacaagatatttattcattggactactttccctcaggtgacaaattagtctccggttctggtgaccgtaccgttcgtatttgggacttacgtacaggccagtgttcattgactttatccattgaagatggtgttaccaccgtcgctgtatcaccaggtgatggtaaatacatcgctgctggttctctagatcgtgctgtgagagtttgggattccgagaccggattcttggtggaaagactagattcggaaaacgaatccggtacaggccacaaggactctgtttatagcgttgtcttcactagagatggacaaagcgttgtatccggctcattagatagatctgttaagctctggaatttgcagaatgcaaacaacaagagcgattcgaaaactccaaattccggcacttgtgaagttacgtatatcgggcataaagactttgtattgtccgtggccaccacacaaaatgatgagtacatcttgtccggttccaaagatcgtggtgtcctgttttgggataagaaatccggcaatccgttattgatgttgcaaggtcataggaattcagttatatctgtggctgtggcaaacgggtctccgctgggtccagaatataacgtttttgctactggtagcggtgattgtaaagcaaggatttggaagtataaaaaaatagcgccaaattaa

SEQ ID NO: 215 - DNA, 1314 bp, Saccharomyces cerevisiae
atgccaaaaaaggtttggaaatcatctacgccttccacttatgaacatatctccagcttaagaccaaaatttgtgtctcgtgtggacaatgttctgcaccaaaggaagtccttgacgttcagcaacgttgttgttccagataaaaaaaataacactctaacctcaagtgttatatactctcaaggtagtgatatctacgaaattgacttcgctgtaccactacaagaagccgcttcagaaccggtgaaagactatggtgacgcctttgaaggtattgaaaacacctcgttgagcccaaaattcgtgtaccagggtgaaactgtctccaaaatggcctacttagataagactggagaaactacattattgtcgatgtctaagaacgggtcgttggcttggttcaaagagggtataaaggtccctattcacattgtacaggaattgatgggtccagcaaccagctatgccagcatccattctttaaccagacctggtgatctacctgaaaaggatttctcattagccatctctgacttcggcatttccaatgataccgaaaccattgtgaagtctcagagtaatggtgatgaagaagacagtattttgaaaatcattgacaatgccggtaagcctggtgagattctacgtactgttcatgtgcctggtaccactgtgactcacaccgtaagatttttcgacaatcatatctttgcgtcttgttcagatgacaatattctgaggttctgggacactagaacttccgacaagcctatatgggtgttgggagaaccaaagaacggaaaattgacctcgtttgattgctctcaggtttccaacaacttgtttgttaccggtttcagtacgggtattatcaagttatgggatgccagagcggctgaagctgccaccactgatttgacttatagacaaaacggtgaagatccaattcagaatgaaatcgctaacttctatcatgccggcggtgattctgttgtcgacgtccaattttctgccacttcaagctctgaattctttactgtgggcggcactggtaatatttaccactggaacactgactattccttgtcaaagtacaatcctgacgataccattgctcctcctcaagatgccactgaagaatcacaaacaaaatctctgagattcttgcacaagggtggaagcagaagatctccaaaacagattggaagaagaaacaccgccgcttggcatccagttattgaaaacttggttggtactgtcgatgacgatagtttagtcagcatctacaagccctataccgaggaaagcgaatag

SEQ ID NO: 216 - DNA, 1953 bp, Saccharomyces cerevisiae
atgagtgtgtctaccgccaagaggtcgctggatgtcgtttctccgggttcattagcggagtttgagggttcaaaatctcgtcacgatgaaatagaaaatgaacatagacgtactggtacacgtgatggcgaggatagcgagcaaccgaagaagaagggtagcaaaactagcaaaaagcaagatttggatcctgaaactaagcagaagaggactgcccaaaatcgggccgctcaaagagcttttagggaacgtaaggagaggaagatgaaggaattggagaagaaggtacaaagtttagagagtattcagcagcaaaatgaagtggaagctacttttttgagggaccagttaatcactctggtgaatgagttaaaaaaatatagaccagagacaagaaatgactcaaaagtgctggaatatttagcaaggcgagatcctaatttgcatttttcaaaaaataacgttaaccacagcaatagcgagccaattgacacacccaatgatgacatacaagaaaatgttaaacaaaagatgaatttcacgtttcaatatccgcttgataacgacaacgacaacgacaacagtaaaaatgtggggaaacaattaccttcaccaaatgatccaagtcattcggctcctatgcctataaatcagacacaaaagaaattaagtgacgctacagattcctccagcgctactttggattccctttcaaatagtaacgatgttcttaataacacaccaaactcctccacttcgatggattggttagataatgtaatatatactaacaggtttgtgtcaggtgatgatggcagcaatagtaaaactaagaatttagacagtaatatgttttctaatgactttaattttgaaaaccaatttgatgaacaagtttcggagttttgttcgaaaatgaaccaggtatgtggaacaaggcaatgtcccattcccaagaaacccatctcggctcttgataaagaagttttcgcgtcatcttctatactaagttcaaattctcctgctttaacaaatacttgggaatcacattctaatattacagataatactcctgctaatgtcattgctactgatgctactaaatatgaaaattccttctccggttttggccgacttggtttcgatatgagtgccaatcattacgtcgtgaatgataatagcactggtagcactgatagcactggtagcactggcaataagaacaaaaagaacaataataatagcgatgatgtactcccattcatatccgagtcaccgtttgatatgaaccaagttactaatttttttagtccgggatctaccggcatcggcaataatgctgcctctaacaccaatcccagcctactgcaaagcagcaaagaggatataccttttatcaacgcaaatctggctttcccagacgacaattcaactaatattcaattacaacctttctctgaatctcaatctcaaaataagtttgactacgacatgttttttagagattcatcgaaggaaggtaacaatttatttggagagtttttagaggatgacgatgatgacaaaaaagccgctaatatgtcagacgatgagtcaagtttaatcaagaaccagttaattaacgaagaaccagagcttccgaaacaatatctacaatcggtaccaggaaatgaaagcgaaatctcacaaaaaaatggcagtagtttacagaatgctgacaaaatcaataatggcaatgataacgataatgataatgatgtcgttccatctaaggaaggctctttactaaggtgttcggaaatttgggatagaataacaacacatccgaaatactcagatattgatgtcgatggtttatgttccgagctaatggcaaaggcaaaatgttcagaaagaggggttgtcatcaatgcagaagacgttcaattagctttgaataagcatatgaactaa

SEQ ID NO: 217 - DNA, 1152 bp, Saccharomyces cerevisiae; identical to SEQ ID NO: 205

SEQ ID NO: 218 - DNA, 1230 bp, Saccharomyces cerevisiae
atgggcaatatccttcggaaaggtcagcaaatatatttagcaggtgacatgaagaagcaaatgttgctaaataaagatggaacacctaagaggaaggtgggcagaccaggcagaaaaaggattgactctgaagctaagagtaggaggactgcccagaatagggcagctcaacgagcgttccgagataggaaagaagccaaaatgaagagtttgcaagagagggtagagttactagaacagaaagatgcgcagaataagactaccacggactttttactatgttctttaaaaagtttactgtcggaaattacaaaatatagagctaagaattctgatgatgaaagaatattagccttcctcgatgatctgcaagaacaacagaaaagggaaaacgaaaaaggaacaagtacagcagttagcaaggctgcaaaggaattgccatcgcctaattcagatgaaaacatgactgtgaacacaagtatagaagtacagccgcacactcaagagaatgagaaagttatgtggaacataggctcatggaacgctcccagtttaaccaattcgtgggattctccccccggaaatcgaacaggtgccgttaccatcggtgacgaaagtattaatggtagtgaaatgccagatttcagtctcgatcttgtctccaatgatagacagactggtctagaagctttagattacgacattcataactactttcctcagcactctgaacgcctgaccgctgaaaaaatagatacgtcagcatgtcaatgtgaaattgaccaaaagtatcttccatacgagacagaagatgatactttattccccagcgtgcttccccttgctgtagggagccagtgtaataatatttgcaaccgcaagtgtatcgggaccaaaccatgttcaaataaggagatcaaatgcgacttaataacaagccacctgttgaatcagaaatctctagcttcggtgcttccggtggctgcttctcatactaaaacaattcgaacccaatctgaagcaattgaacacattagcagcgccatatcgaatggaaaagcgtcttgctaccacattctcgaagagatctcctccctaccaaaatattcatcgttggacatagatgatttatgcagcgaattaataatcaaggcaaaatgtacagatgactgcaaaatagtagtcaaagctcgcgacttacagagtgctctggttagacagctcctgtag

SEQ ID NO: 219 - DNA, 1944 bp, Saccharomyces cerevisiae
atgaaatatcccgcttttagcattaacagtgacacggtacacttaacggacaaccccctggacgactatcagcgtctctacctcgtcagcgtactggatagggactcgccgccggccagtttcagcgccggactcaatattagaaaggttaactataaatcctccattgctgcgcagttcacacatccaaacttcattatcagtgctcgggacgcagggaacggggaagaggcggcggcgcagaacgttctgaactgcttcgagtaccagtttcccaacctacaaacaattcagagcctagtccacgaacaaacgttgctatcgcagctcgctagctccgccactcctcactccgccttgcatctgcacgataaaaatattctgatgggtaagatcatactaccttcccggtctaacaaaacaccagtctcagcatcacccaccaagcaagaaaagaaggctctgtcaacagcatcgcgtgaaaatgccacctcctcgctgacaaagaatcagcagttcaagttgaccaaaatggaccataatctgatcaatgacaagctcatcaaccctaacaactgcgtaatatggtcgcatgactccggctatgtgttcatgacgggcatctggcggctgtatcaggatgttatgaaggggcttataaacttgcccagaggtgacagcgtttccactagccaacagcagttcttttgcaaggctgaattcgagaaaattctatctttttgcttttacaatcacagttcgttcacttctgaggaatcttcaagcgtactgttgtcgtcctccacctcttcgccgccaaagagacggacatccacagggtctaccttcttggacgccaatgcgtcttcttcatctacttcttcaacgcaggcaaacaattacatcgattttcattggaacaacatcaagcccgaactgcgggaccttatttgccagtcttacaaagacttcctgatcaatgaacttggtcctgaccaaatagacttgcccaacttaaatccggcaaattttacgaaaagaataagaggtggttacatcaaaattcagggtacttggttgccgatggaaatctcaaggttgctatgcctgcggttttgttttccgatcagatactttctggtgcctatttttggtccagatttccccaaagattgcgaatcgtggtatttggctcatcaaaacgttacatttgctagttctaccactggtgcaggtgctgctactgctgctactgctgctgctaatacaagtaccaattttacgtctactgcagtggcaagacctaggcagaagcccagacccaggccaagacaaagatctacttccatgtcccattccaaagcgcagaaacttgttattgaggacgccttgccctcattcgactcatttgtagaaaacttgggcctttcctcaaatgacaagaacttcattaaaaaaaacagcaaaaggcaaaagtcgtccacatacacctctcaaacttcttctccaatagggccaagagatccaacggtgcaaattttgtcaaacctagcatccttctacaacacccacggtcaccggtattcatatccgggaaatatctatataccacagcaaagatactctttacccccaccaaaccagctctcgtcgccacagcggcagctaaactatacttacgaccacattcacccagttccttctcagtaccagtctccaagacactacaacgtcccctcttcaccaatcgcgcctgctcctcccactttccctcaaccttatggtgatgatcactatcattttttgaaatatgctagcgaagtttataagcaacaaaaccaacgaccagctcataatacaaataccaatatggacacctctttttcgccaagggcgaacaattcactgaacaatttcaaatttaaaacaaactcaaaacaataa

SEQ ID NO: 220 - DNA, 2193 bp, Saccharomyces cerevisiae
atgcaagacgaccccgaaaattcgaagctgtacgacctgctgaatagtcatctggacgtgcatggtcgaagtaatgaagagccgagacaaactggtgacagtaggagccagagtagtggcaacaccggtgaaaacgaggaggatatagcatttgccagtggattaaacggcggcacattcgactcaatgctggaggcactgcccgatgatttatattttacggacttcgtgtctccttttacagcagctgccacgaccagcgtgactactaagacggtcaaggacaccacaccagctaccaatcatatggatgatgatattgcgatgtttgattcacttgccacaactcagcccatcgacatagccgcatccaaccaacaaaatggtgaaattgcacaactttgggactttaacgtggaccaattcaacatgacgcccagcaactcgagcggttcagctactattagtgctcctaacagctttacttccgacataccgcaatacaaccacggttccctcggcaacagcgtctccaaatcctcactgttcccgtataattccagcacgtccaacagcaacatcaaccagccatctatcaataacaactcaaatactaatgcgcagtcccaccattccttcaacatctacaaactacaaaacaacaactcatcttcatccgctatgaacattaccaataataataatagcaacaatagtaatatccagcatccttttctgaagaagagcgattcgataggattatcttcatccaacacaacaaattctgtaagaaaaaactcacttatcaagccaatgtcgtccacgtccctggccaatttcaaaagagctgcctcagtatcttccagtatatccaatatggaaccatcaggacaaaataaaaaacctctgatacaatgtttcaattgtaaaactttcaagacaccgctttggaggagaagcccagaggggaatactctttgcaatgcctgcggtcttttccagaaattacatggtaccatgaggccattatccttaaaatcggacgttatcaaaaagaggatttcaaagaagagagccaaacaaacggacccaaacattgcacaaaatactccaagtgcacctgcaactgcctcaacttcagtaaccactacaaatgctaaacccatacgatcgaggaaaaaatcactacaacaaaactctttatctagagtgatacctgaagaaatcattagagacaacatcggtaatactaataatatccttaatgtaaataggggaggctataacttcaactcagtcccctccccggtcctcatgaacagccaatcgtataatagtagtaacgcaaattttaatggagcaagcaatgcaaatttgaattctaataacttaatgcgtcacaattcgaacactgttactcctaattttagaaggtcttcaagacgaagtagtacttcatcgaacacctcaagttccagtaaatcttcatccagatctgttgttccgatattaccaaaaccttcacctaatagcgctaattcacagcagttcaacatgaacatgaacctaatgaacacaacaaataatgtaagtgcaggaaatagtgtcgcatcctcaccaagaattatatcgtccgcaaactttaactcaaatagtcctctacagcagaatctattatcaaattctttccaacgtcaaggaatgaatataccaagaagaaagatgtcgcgcaatgcatcgtactcctcatcgtttatggctgcgtctttgcaacaactgcacgaacagcaacaagtggacgtgaattccaacacaaacacgaattcgaatagacagaattggaattcaagcaatagcgtttcaacaaattcaagatcatcaaattttgtctctcaaaagccaaattttgatatttttaatactcctgtagattcaccgagtgtctcaagaccttcttcaagaaaatcacatacctcattgttatcacaacaattgcagaactcggagtcgaattcgtttatctcaaatcacaaatttaacaatagattatcaagtgactctacttcacctataaaatatgaagcagatgtgagtgcaggcggaaagatcagtgaggataattccacaaaaggatcttctaaagaaagttcagcaattgctgacgaattggattggttaaaatttggtatatga

SEQ ID NO: 221 - DNA, 3249 bp, Saccharomyces cerevisiae
atgactaccacgataggatccccacaaatgctggctaatgaggagagactttctaacgagatgcacgcactgaagaaccggtccgagcagaatgggcaagagcaacagggtcccgttaagaacactcaactgcatggcccttctgcaaccgacccggaaactacggccacccaaaaagaatctctagaaatggtaccgaaagatacaagtgcagcgactatgacaagtgcgcctccgccagcgttgccgcatgttgagattaatcaagtcagtctggcattagtaataaggaacttgacggtatttacaatgaaggaacttgctcagtacatgaaaactaatgttcacacccaggcaaatgagcctaactccgcaaagaaaatacgtttcttacagctgattatattcctaaggacacaatttttgaaactttacgtgcttgtgaaatggacccgtactataaaacaaaacaactttcacgtactaatcgatctgttgaactggtttagaacgactaacatgaatgtcaacaattgtatttgggctttgaaaagcagtctaaactctatgaccaatgctaaattgcccaacgtggatttggtcaccgctttggaagttttgagtcttgggaggccaaatctacctacacacaactttaaattaagcggtgtcagtaactctatggatatggtagatggaatggccaaagttcccattggattgattttacagagattaaaagatttgaacttgactgtctcaataaaaattgcattaatgaacattcctaaaccattaaacagctatcatatcaaaaacggtagaatctactttactgtccctaatgaatttgaaatccagttatcgactgttaatagacagtcccctctgttttttgtggatttaaaattgttgtttaacacggaagctgaacaaactgtttcagcagttacagaagctacttcgactaacggcgatagtgagaacaatgaagaaaactcaagttccaacggaaataaccttcctttgaataagccaagattagagaagttgatcaatgaaattcttttgaaaagtaatgatccattattatccctatacaattttctgcacaaatacgtgttgacattacagctatacatggttcatagagagtttttaaagctggccaacggcggtaaattttccaaaagtaatttgatccataactatgactctaaaaaaagtacaattacagttagatattggctgaatgggaaaatggacagtaagggtaagatcactattggcattcaaagaacaacagaaagtcttatcttaaaatgggacaaccagagtgcatcaagggccaaaaatatgcctgtaatttataacaatattgtatctaatatcgaagggattttggatgaaattatgttcaatcatgctagaatcatcagatcggagctgttggcaagggatatattccaagaagacgaagaaaattcggatgttctattatttcaactccctaccacatgtgtttccatggcgcctattcaattaaaaattgatttattgagcgggcagttttattttaggaatcctactccactattatcaaattacgcgtcaaagataaatagagctgaaggtccagaggaattggcaagaatactacagcagctgaaactggacaagattattcatgttttaaccaccatgtttgaaaacacgggatggtcatgcagcaggattattaagattgataaaccaatcaggactcaagtgaatactggcggcgaaagcgttgttaaaaaagaagataataaatatgctattgctggtaacagcactactaatagtgatgtttccttgttattacaaagggacctatttatcagactaccacattggccgctcaactggtatttgattttatcgataatatcctctaaaacatcatgtgtggtggaaaaaagaatcggtaaaattgtctctcaacgtgggaaatggaatctcaaatatttagacaattccaacgtgatgactgtcaaattggagtcaataacatatcaaaaaattatgatattgcaaagaactattttaaacagaattataaaccatatgttgatcgattctttgaaccaactagaaattcgcaataagatttgttcttctgaaatgatcaacgagcaaaaactacctcaatatattatccaaggaagtaatactaatgataacatatcaataataactctagaattggagtcatttttggaaggttcaaaagcgctgaactccatattagaaagttccatgtttctgaggatagattactccaattcccaaatacgattgtatgctaaatttaaaagaaacacaatgatgattcaatgccagattgataaactatacattcattttgtacaagaagaaccgttagccttttatttggaggagagttttacaaatcttggtataatagtgcaatatctaaccaaatttaggcaaaaattgatgcaattggttgtactaacggatgtcgtggaaagattgcacaagaattttgagtccgaaaacttcaagataattgcattacaaccgaatgaaatttccttcaagtatctctccaataatgacgaagatgataaagactgcacaataaagatatcaacgaatgacgactctattaaaaatctgacagttcaactatcaccttcaaacccacaacatataattcaacctttcttagataattcgaaaatggattatcattttatttttagctacctacaattcacgtcatccttgtttaaagctctaaaagtaattctcaatgaaagagggggcaaattccatgagagtggaagtcagtactccactatggtgaacattgggttgcataatctaaacgagtatcagatagtatattataaccctcaggcaggcactaagattacaatatgtatagaattgaaaactgttttgcataacggccgtgataaaattcaatttcacattcattttgcagacgtagcacacataaccacgaaatctcccgcctatccaatgatgcatcaagtgagaaatcaagtatttatgctggatactaagagattaggtaccccagaatctgtcaaacccgcaaacgcatcacatgccattcgtttgggcaatggcgtggcttgcgatcccagtgagatagagcctatcctaatggaaatccataatatcctcaaagtggactcgaactcaagttcatcttag

SEQ ID NO: 222 - DNA, 1794 bp, Saccharomyces cerevisiae; identical to SEQ ID NO: 180

SEQ ID NO: 223 - DNA, 4029 bp, Saccharomyces cerevisiae
atgagcttatcaccacacgtagaaaatgcttccattcccaaggggagtaccccgataccaaaaaacagaaacgttagttctataggcaagggcgagtttcttggatcttcgtcaagcaacaattcttcttttcgaatgaatcattactcaaatagtggacaaccttccgtgttagattctatacggcgacctaatctaactccaactttttcttacagtaatggggtttatatgcctgaaagtcacagaactagttcattcaacgatagttatttgccatatgataagaatccttacgcaaaaacaaccggaagcatgagcaataaatcgaacatgaaaatcaaaacaaagaaaaatgcaatcaacacaaatacaagaaagtcgtctggactcatttacaccaccaaagtggataaagaattatctagtatagacaaagtgaatgatccaaacattaacggtcttgtttgtgcaggtaaaactcatttggggctctataaattctcgccctcagatagatctatcaaatgcgttcatgatttcataacacctaatagcaacacctcaacaaggggaacgacatcccttttgcccaagctgagcaaaagaacaagacagaacaaatttagtaccattgcggatgttaagactggatttaataattacaagaactgtattgcagtgtgcaacaattctacggcgatatcgatatatgatctcaataagagttcctcgatagacaatcccttgataacatccttatgcgaacacactagatctatcaatagttttgacttcaacatggtcgaatcaaacctaataataagtggtggacaagatagttgtgtaaaaatatgggatttacgttccaataaatctaaaagctcaaatagatctgacattagtataaataccgcatctgactcaatcagagatgtaaaatggatgcccggttacaattttgcatctaagaacgatcaaggttcatcaacgtatggtaatttaaaaagcggttacaaatttgcttctattcacgattcgggatacttgctaaagtttgatcttcgacaacctgcccaatacgaaaaaaaattaaatgctcacacaggacccggtctttgtttaaattggcatcccaatcaagaatacattgctacaggtggtagagacggtaaatcctgcctctggtttgttggcgacaatgccaatgccgccgaaaatacagtcctcaattacgggaactctccctcgttacatgcccccaatacgtccttgaacaatagcggctcgctggcatttcccaaactaacaattaatacgggctatccagtcactaaattgaagttcaagcctgcttatagtagtaatatatataattcattactaggaatatcgtcaatgggtgacgaagctgaagttcgcatctattccttggcaagaaagtacattccaaaacatgttctcctatcagaaacgccttctttaggattagtatggtgggacgaaaacttgatctttaatatcgataaggggacccgtataaatggctgggacattaacaaagaaccaacagtgctcgaaaatttgagcaaaaatacaacaacttggagagatttggatggtaacggtttactttcagttggccaagagataggctcatatgaggtggtagaaccggagcttcaacctacctcaagtaccacatgcaagaagcatccaggtacaataaaaaacccgaagaatggcaatccagagaaccagggaataattggagggataaaaaaaggatttagccatactggattaacaagttttacgccagagaggccgcctactttaaaagcaggcccaacgtttagcacaaaaagcttaacattagcatctggagcatcttcttttaacagctcttccgcatcattgacatccctgacgccacaaactgaaaatagagaagaaatcgccattgaaccgccttgtatcatcactttggatataccgcagatcttcaataacataagattaaccaaaatcgcacattcaagaaaaaagaacgtcatttccgaaagttcttctatgaaaaattctccagtagaaaagttcaaatatttggcgagacagctcaagttttcgtatattcgagagcataatgtttcagacagtgcagacactgcatataaaaatgatatagagaacattgacgtcgttaaaaacgcaaccgaaacacatggtgataatactactactaccaataataatgatgatggtgatgatgatgatgatgatgatgatgatgacaaaataatcgaaagtcaccttttgaaaaaatacaattttccagaaaataatacatgggctaccttaatgaatgaaaaagtaaataacaaaaaatccaaaagaaattccagtagttcgagggagtttgacgagaaggatgtcagatcaagtatatcttccatttctgcaagtaggcaaagtcatgacagagctaggaagatcgacaagaacgtggaagcagaactgcaagaaaaaatacaaacactggtagatttgatatctattgcaacgcataacgcatctgtttatctatccatagatgatctaaccaacttcaaaatctggatcttgataagagattcattgttatgggacttgaagtggatgacctcctcccaaatttcatcagataacgcatctaatatggatgccaatgaaagctccgatttcgaagctggagaaaatctgaaaacaggaaaagagttcccagaggaggatggtgcagggacaagtggggctgagtcgttagttgaagaaaggccgcaggcatttcgtgctaactctgatgaaccaagtgatgccgaaaagaaacctgtttctaagctcaaagagcagctcaaaaacacggaaataatcccctatgcgcagccaaatgaggattcagatgaagttttaactaagctaaaagagctacagaaccaacgcttggagtcaaggactaaaatgggagaaacagtgagtgacgatgtgattatagaggaagacgaacatgaacatcaagaagaagaacagcctcatgactcaccgactaagtcagcacaatttcacgcgtctcctatcgcgaaaagtataccaatattgcagaaacgtgagcaccgcaagtcattcatagatactttcatgttgcattctcccaacggttacaatggagatacggacataggtaacgaagatgacaatatatctcctaggtttacttacaacagcgtaagcccacgcagtaaggtttcgtcgctacaaagctatgccacaacaacctcgcaactagaaacttttaaaaagctttcttcccatacagcaccaataatcggttcgcccagacatgcgccatcacggccagatagcattggtagggaacaactgtcttcttcattgacgaaaaagcttgccaaatgcaagaaaattatcgctgacccaccctgggacacgaaaaaactcatcaaacaactctacaatcaagctactgagactgggaacgtcgtattgacggtgaatattttatttcttttccaaacgatataccaaataacagaaatcgacattgcaaaggacgcaatcgctcacttcttgttattattacatcgatacgaactcttcggcattgctgcagacgtcgtcttaaaatactgcccattcgaagatatcatgggttctgagggtgaccaatcttccattcggttgttttgcgaacgctgtggtgagttaatcactaacgaaagttctaaagaaaagctcagagcggaagctcagcagacgggcaataagaagatcatggacaagtttggatactggtattgtgactcttgtaagaagaagaatacatcttgtgttctatgtgaaagaccattaaagaaactgaccatggtcatcctcccctgtggacacgaaggtcacttccagtgcatacaagaatggtttctcgatgagaatgaacaagaatgtcccggcggttgccccggtgttgcattcatctag

SEQ ID NO: 224 - DNA, 1533 bp, Saccharomyces cerevisiae
atgcacgttttctttcctttgcttttccgcccttcccctgttctgttcatcgcatgtgcatatatatatatagatatatatatacattgtacacggtgcacggtagtgaacataactatgagcacgaacagagtcccgaacctcgacccggacttgaatttaaacaaagaaatctgggacctgtactcgagcgcccagaaaatattgcccgattctaaccgtattttgaacctttcttggcgtttgcataaccgcacgtctttccatcgaattaaccgcataatgcaacattctaactctattatggacttctccgcctcgccctttgccagcggcgtgaacgccgctggcccaggcaacaacgacctcgatgacaccgatactgataaccagcaattcttcctttcagacatgaacctcaacggatcttctgtttttgaaaatgtgtttgacgacgatgacgatgatgatgacgtggagacgcactccattgtgcactcagacctgctcaacgacatggacagcgcttcccagcgtgcttcacataatgcttctggtttccctaattttctggacacttcctgctcgtcctccttcgatgaccactttattttcaccaataacttaccatttttaaataataatagcattaataataatcatagtcataatagtagtcataataataacagtcccagcatcgccaataatacaaacgcaaacacaaacacaaacacaagtgcaagtacaaacaccaatagtcctttactgagaagaaacccctccccatctatagtgaagcctggctcgcgaagaaattcctccgtgaggaagaagaaacctgctttgaagaagatcaagtcttccacttctgtgcaatcttcggctactccgccttcgaacacctcatccaatccggatataaaatgctccaactgcacaacctccaccactccgctgtggaggaaggaccccaagggtcttcccctgtgcaatgcttgcggcctcttcctcaagctccacggcgtcacaaggcctctgtcgttgaagactgacatcattaagaagagacagaggtcgtctaccaagataaacaacaatataacgccccctccatcgtcgtctctcaatccgggagcagcagggaaaaagaaaaactatacagcaagtgtggcagcgtccaagaggaagaactcactgaacattgtcgcacctttgaagtctcaggacatacccattccgaagattgcctcaccttccatcccacaatacctccgctctaacactcgccaccacctttcgagttccgtacccatcgaggcggaaacgttctccagctttcggcctgatatgaatatgactatgaacatgaaccttcacaacgcctcaacctcctccttcaacaatgaagccttctggaagcctttggactccgcaatagatcatcattctggagacacaaatccaaactcaaacatgaacaccactccaaatggcaatctgagcctggattggttgaatctgaatttatag

SEQ ID NO: 225 - DNA, 921 bp, Saccharomyces cerevisiae
atgaattataactgcgaaatacaaaacaggaacagtaagaatgttgacaatcaagtcagtctaccccctatccaagttctatttaactccatagaaaaacggagtatgcccgagttggcattttcgaacatagaatactcgcatgggaaccttcggtctagtaccgaggaacaaaactatcctgcgcctgtgttacttccacagcatcattcgattgcgtatcccgcaattaattctggcggtactagtactactgctactcctactgcttctacagttgaaacgtccaagacgagtagcagtgctatggatacacaatctcaatatggcagttcaaagaagtcaaaatcggcgtccgatgatgcaaagccctgctacaaatccgccccaatatatgaaataatcaataaggaaaaggatgcgggggcacaatacaacaggccattttcggattttgtagaatctaaatcaaggaggaagcaaaattcgggcaggaggtctaacctgccaaaggaaacagtgcagatactgaatacttggttgctgaaccacctgaataacccctacccaactcaacaagaaaagagggagttgttaatcaaaactgggctaaccaagattcaactttctaattggttcataaatgtgagaagacgcaaaatatttagtgattactataccctggtaaactcaattcctaatgacaacgcgaataataccccagtggaacgagttcaaaacgtctcagcatatcataacacattatctgccacaaataatactatgtacgatgctacgtcaacctgctccacggattatgaattatccaagagatttgctcatgcccccgttacacgccgtaaaaaactaattgataggctggaagaattgaaaaagctatccaaccctgatatgaattga

SEQ ID NO: 226 - DNA, 1848 bp, Saccharomyces cerevisiae
atgctaagctatttccaagggtttgtgcccatacacacaatattttactccgtgttccatcctacagaaggttctaagattaaatacgagtttccgccaaataatttgaaaaatcatggtattaatttcaacacatttaaaaactacatcataccgaagcctatattatgccacaagttgatcacttttaagtatggtacatataggattgtatgttatcctgtgacaatcaattctccaatatatgctaggaatttttttagttttaattttgtatttgtattcccatatgattgtgagacgtctccctacgaaccagctattactaggctgggcaaaatgttcaaagttcttgaagaacaaaatcaattgctatccaaatcggaaagagatccagttttcttcgatttgaaggtgttggaaaactccacaacaacaccctccactgcaggtccttcatccacgccaaatcctagtagtaacaccacaccaactcatcctacatccgaaaaggatacaaaggatatgagaagcagcagatacagtgaccttatcaaggatttgggccttccgcaatccgcattttccatacaagatttattgatgagaattttccaagacctgaataactattccgaatgcctcataccaattgatgagggaaatgcagtagacataaagatttttccgctgttgagaccaccgacaacttgtgtctcattagaagatgtgcccctgtcgtctgtaaatttgaagaagattattgatgtcaactgggatccaaccatgatgagtatagtcccttacattgatggcttaaacagcattgccaaaatttctaaactaagcaacagtgatcctggcctagtgatagagtgcatacgtcacttaatatactataagtgtgttacattatcagatattttccaattttctaacatatacgctccttcttcattaattaggaattttttgactgatccactaatggctagtgactgtcaatcttatgttacgttcccagaagtgtctaaaatatcgaacttgcccttaaacaaaagtctgggttcaggtgaccaagactcaccatcattttctgtacgaagaaaatccaaatcatctagcataccgtcaaacccggattctagaactacatcttttagttctaccagtagagtttctcaaaactcctccttaaattcctctttttcatcaatttataaagactggaggcaatcacaaacctcctgctcgagttcaaatattcatgtcatcaacaatcgtaaccgattcctaccaacaagatcatgcctatttgacctttataggtcactttcacaaggtcaaacgctgaaaacatggtatgagtcgaaatatatgattttaaaagaaaataacattgatataagaaggttcataacgtttggcctggaaaaacgtatcatttacaggtgctactcttttcctgtaatgataaatgcaggttcacgtgaaccaaaagaaatgacaccaataataacaaaagatttagtgaataatgataagttacttgaaaaaagaaatcacaatcatttgctttcagccacagggtctagaaatacggcacaatccggcaacttgaaaccagaaagaccatcaaaggtttcatttgaaatgcaaagggtaagttcgttggcaacaggcaaaagtactatgccgaaactcagcgacgaagaagaaggtattcttgaagagtctattaggaatgccgaaacatttgataaaatttgcgttttactgagcaagcctaaattagaagtcgaaagctacctaaacgaattaggagaatttaaggtaattaatagctga

SEQ ID NO: 227 - DNA, 2895 bp, Saccharomyces cerevisiae
atggaccctcaccaatcaccagctgataatgccgcatcgcctacgaagagcgtgaaggcaaccactaaaaattcgtccacgaataataatgtcaatagcaacaacagcaataataacagtaaccatgatatactgaattttaatgataactatactaccattctgcaacatttggcaaacgaccatcctaatatactgagggagaaaggaggatcacaacaacaacagcaacagcagcagcagcagcaacagcagcaacaacagagcctggatacccttttgcaccattatcaaagtttactctccaagagtgataatgcaatagcctttgatgacaatgttagtaacagcgcagatcataatggcagtaatagcaacaataataacaacaataatgacatatctagtcccggtaatctgatgggatcttgcaatcaatgtagattaaagaaaacaaagtgcaactattttcccgacctaggcaactgtctcgaatgtgaaacgtcaagaactaaatgcaccttcagtattgctccaaattatttgaaaagaacgtcctctggggcaaacaataacatgccaacctcttcaaactccaaacgaatgaaaaattttgaagactattcgaatcgcttacccagtagcatgctctatagacatcaacagcagcagcaacagcaacagcagcaacagcgtatacaataccccagatcctcttttttcgtcggtccggcctcagttttcgatttgaacttgaccaagcatgtaagactagataatgttgaccaaatacagctatcaaaaactttatcattaagaaaggtgtctcctaccgcacagtttattcttcaggacgattttgacacgacccttcatagtaagcaagaatacgaagttgatttggtcgaaaatctggtacatccgcacggtcaccttttagtagagattttcttcaaattgattcatccttttcttccaattttacacgaacgtgtatttttggaaaagtattctagatcttatagagaactcactgcgcctttactggcatccatttactcactggcattacaatattgggattttcatcctgcgcttttggggttccctaaacccgatgtaactgctcaactaaacaatatcgcattggaaacattttatgctcgagttggaaggccaaaattgagcattatacaaacaggccttttgattttgcaatgccgtagtgaatgtcataacaactgggtcctctgctccagcgtagtggcccttgcagaggaattggggctcggggttgaatgtaatgattggaaacttcccaaatgggaaaaagatttgagaaagagattagcgtgggcagtttggttgatggatagatggtgcgcactaaacgaaggtagacaatcccatttaattttaggtaggaactggatgatcaagctattaaactttgatgattttcctctgaatttgccaactattttaaattccttgcaaaatggccagtcggggtcttcaccctcgtcatcaaatgatgtgaaaaaccatcagatagcatttggtaacttgcccatatttaatataaaccccactttagaagatttcaagaatggaacgcttatgtttcaacaaatggtttccttgagtataattcttggggaaatcatggacacattttacactcagggatccatgacaataaacaaaagcattgaacaggtattgaaactggcaaagccgttgcaactgaaattaagagaatggtaccattccctacccaagaatttgtcaatgagttatgccacgccacaaaaattgaactcaaattcaactttaactctagcttattttgccacggaaattacgttacataggaaaattatctgtgccttgaatcctcaaactccaaaggaactggttcaagtatgcaggactgctgcaagaaccaggcttgtagcagcaattgaatttataagagatctaaaaaacgaacatattaatgctttttggtataactgctcaactggaaatctgatgctaattggaacatttgctgccctgctgtatgtgacttcagctacgaaggaagaggctatgattttcagagattatgttagaaattatacctgggtattgaagataggttccaaatactttgataaactatcgaatgctttgaataatatgcatttactatttgcacaaattcctggtcttctgaccgatgaaccggtggtcgtgagccctaactctaacatcagttccgttaacccacaaaggtcaggtgtacaatcgcaaatcccaatacaatttaacgtgggatcacctgccatgaccgagcaaggatctcctttaaaccagtggaagaatctgccccaggaaatcttgcaacaactaaactcctttcccaacggtacgaccagtacaacaacgccagtaaaccccacttccagacaaacacaactagaatcgcagggaagtccagccataaatagtgctaataataatagcaacaacacgcctttaccatttgcgccaaataagtcttctaaaaaaacttcacaatcttcaccaaatgttacgccctctcatatgagcagacaccccccctctaatacatcttcaccaagagtcaattccagcacaaatgtcaactctaatacacaaatgaatgcttctcccttgacctcaattaacgaaaccagacaagagtcaggtgacgctgcagatgaaaaaacagcaggaagagaaagaaccgccaacgaggaatcatcaacggaactcaaggacgataatccaaactcgaaccaggaaacaagcgcaactggtaaccaaactataaaaatgaatgatgataaaaatgtaacaattaacacaagggaaacccctctgtaa

SEQ ID NO: 228 - DNA, 768 bp, Saccharomyces cerevisiae
atggatgaatcggtggatcctgtggagctgcttctacgactactgatacggcacaaacctcatctgaaaccatatgcctacagacaagatagctggcaaagggtgctcgatgagtacaacagacagactgggtcaagatatagacaatcaaggacgttaaaaaccaaatttcgtcgactgaaggacctcttcagcgcagatcgagcccaattctctccttcccagttgaagctgatgggagcactcttggacgaagcatcagaacatccaagaccaagaactaaattcggaaatgaatcatcttcatcctcatcatcatcttctttcattaaaagtcatccggggcctgatccgtttcaacaattatcatccgctgaacatccgaataaccacagctccgacgatgagcattcaggctcacaaccgctgcccctggattcaataacgattggaattccgcctactcttcacacaatccccatgattctgtctaaggataacgacgtcgggaaagtcatcaaaagccctaagataaacaagggtacaaataggttcagcgagacagtactgcctccacaaatggctgctgagcaatcgtggtcggactctaatatggaattggaaatatgtctagattatcttcacaacgaactcgaggtgataaagaaaaggcaagaagattttgagtgtaaagttttaaacaagctcaacataattgaggctctcctttcacagatgagaccacccagccaaggagataaaatataa

SEQ ID NO: 229 - DNA, 5853 bp, Saccharomyces cerevisiae
atgtccgttgctgatgatgatttaggatctttacaaggtcacattaggagaacactgaggtctattcataacctcccctattttaggtatacgagaggtcctactgaaagggctgacatgagcagagcccttaaagagttcatttacagatatctatactttgtcatttctaacagcggagagaacttacctactttattcaatgctcatccaaaacaaaaattatctaacccagagcttactgtttttcctgacagtttagaagatgctgtggatattgataagataacatctcaacaaactattccgttttataagatagatgaatccagaataggagacgtccataaacataccggaagaaattgtgggaggaaattcaaaataggggaacccttgtataggtgtcatgagtgtggttgcgatgatacttgtgtgctttgtattcattgttttaatccaaaagatcatgtgaatcatcatgtttgtaccgatatatgtactgaattcactagtggaatttgtgactgtggagatgaagaagcttggaattctccacttcattgcaaagctgaagaacaagaaaacgatatatcggaagatcccgccacaaatgccgacataaaggaagaagatgtatggaatgattcagtgaatatagcattagtggagttggttcttgcagaagtgtttgactattttatcgatgtttttaaccagaatatcgaacctctacccacaatacagaaagatatcactatcaaattaagagagatgacacaacagggaaaaatgtatgaaagagcgcagtttttaaacgatttaaaatatgaaaacgattatatgtttgacggaacaacaacagcaaagacgagcccctctaatagccctgaggcatctccatcgcttgcgaaaatcgatcccgaaaattacacggtaataatatataacgatgaatatcataactattcgcaggctacgactgccttgagacagggggttccagataacgtacacattgatctattaacatccaggattgacggagaaggtcgagcaatgttgaaatgttcacaagatttatcatctgtcttaggtggtttttttgctgttcaaacgaatggattaagtgccactttaacatcgtggtcagaatatcttcatcaagaaacatgcaagtatatcatcctttggattacacactgtttaaacataccaaactcctccttccaaaccacttttaggaacatgatgggtaaaaccctgtgttcagaatacttaaatgcaacagaatgtcgtgatatgacaccggtggtggagaaatatttcagcaacaagttcgataagaatgatccctacagatacatcgatttatctatccttgcagatggcaatcaaattcctttgggtcatcacaaaattctacccgaatcaagcacccattcactttcaccattgataaatgatgtagaaactccaacatcaagaacatattctaatacaagattacaacatattctttattttgataacagatattggaaaagactgagaaaagatattcagaatgtgatcattccaacgttggcctcttcaaatttatacaagcccattttctgtcaacaggtagtcgaaatattcaaccacatcacaagatctgtggcatatatggatagagaacctcagctaacagctataagagagtgtgtcgtacagttatttacatgccctacgaatgccaaaaatattttcgaaaaccaaagttttttggatattgtgtggtcaattatagacatttttaaggagttttgtaaggtggaaggtggtgtattgatctggcagagagttcaaaaaagcaatttaacaaagagttacagtatatcattcaagcaagggttgtatacagttgaaactttattgagtaaggtacatgatcctaatattccattgagacctaaggaaataatatctctattaactctttgcaagctcttcaatggagcgtggaagataaagcgtaaagaaggtgaacatgttcttcacgaagatcaaaatttcatctcctatttagaatataccacctccatttacagtattattcaaacagcggaaaaagttagcgaaaaatcaaaagattccattgattcaaagctttttttaaatgcaataagaattatcagttcatttctaggcaatagatcactaacatacaagttaatatatgattctcatgaagtcattaagtttagcgtaagccacgaaagagttgcatttatgaatcctttacaaacaatgctttcattccttatcgaaaaagtgtctttaaaggatgcatacgaagcgttagaagactgttcagattttctgaaaatatcggatttctctttgagatcagttgtattgtgctctcaaattgacgtcgggttttgggtaagaaatggtatgtctgtgttacatcaagcatcgtattataaaaacaatcccgaattaggttcctattccagagatatacatttgaatcagttagctatcctttgggaacgtgatgacattccgagaataatatacaatattcttgatagatgggaattactagactggtttacaggtgaagttgactatcaacacactgtctatgaggataaaatttcattcatcattcaacaattcattgcctttatttatcaaatattgaccgaaagacaatattttaaaactttctcttctctaaaggatagaagaatggatcaaatcaaaaattcaatcatttataacctttacatgaaacccctttcgtattcaaagctactaagatcagttcctgactacctaactgaagatactaccgagtttgacgaagcacttgaagaagtctctgttttcgttgagcctaagggcttggccgacaatggtgtttttaaattaaaagcaagcttgtatgcaaaggttgatccgttaaagttgctgaatttggaaaacgaattcgaaagtagtgcaactattattaaatcacatttggctaaggataaggatgaaatagcaaaagttgtactaataccccaagtctcaataaaacagttagataaagacgctctcaatctgggtgcttttacaaggaatacggtatttgccaaagtggtctataaactactccaggtatgtctggatatggaggatagcactttcctgaatgagctactacatttagttcatggtatattcagggatgatgaattgataaatggtaaggactctataccagaagcttatttgtcaaagcctatatgtaatttactcttgagcatagccaatgctaaatcagacgtattttccgagagtattgtccgtaaagccgactatttgttagagaagatgataatgaaaaaaccaaatgaactttttgagtcattaattgccagttttggcaaccaatacgttaatgattataaggataagaaactacgccaaggagttaacttacaagagacagagaaggaacgaaaaagaagattggccaagaaacatcaagcaaggcttctagccaagtttaacaatcaacaaacgaaattcatgaaagaacatgagtctgaatttgatgagcaggataacgatgttgacatggtcggtgaaaaagtatatgaatcggaggattttacctgcgcactatgtcaagattccagttcgaccgatttttttgtgatacctgcgtaccatgatcattccccgatatttagacctggtaatatttttaacccaaatgaatttatgcccatgtgggatggtttctacaacgatgatgaaaaacaagcttatattgacgatgatgttttagaggctttgaaggaaaacggtagttgtggatctaggaaagtatttgtatcctgtaatcatcacattcatcataactgcttcaagaggtacgttcaaaaaaagagattttcatcaaacgcgtttatatgtcctttatgccaaacattttcgaattgtactttacctctttgtcaaacctcaaaggcaaatactggtttgtcgctagatatgtttttggaatcagaactttctttggatacattgtcaaggctcttcaaaccttttactgaggaaaattatcgtacaataaactctatattttcgttgatgatatctcagtgtcaaggttttgataaagcggtaagaaagcgggccaacttttcgcataaggacgtttctttaatattaagtgtgcactgggcaaataccatttcaatgttagaaattgcttctaggttagaaaagccatacagtatttcatttttcagaagcagggaacagaaatacaaaactttaaaaaatatattagtctgcattatgctgttcacctttgtcataggcaagccaagtatggagtttgaaccgtacccgcagcagcccgatactgtttggaaccaaaatcaactcttccaatatattgttcgaagcgctttattttctccagtttcacttcgtcagactgttacagaggcgttaacaacgttctctagacagtttctaagagattttcttcagggtctttctgatgcagaacaggttaccaaattgtatgctaaagcgtccaaaattggggatgttcttaaagtaagtgagcagatgctcttcgccctaaggaccatatctgatgtacgaatggagggattggactccgaaagtattatttatgatctagcttataccttcctgttgaagagtcttcttcctacgataagaaggtgcttagtctttatcaaagtgctacacgaattagtgaaagattctgaaaatgaaacgctggtcatcaacggtcatgaggttgaagaagaactggaattcgaagataccgccgagtttgtcaataaggcattgaaaatgattactgaaaaagaatccttagtcgatcttttgacaacgcaggagtccattgtatcgcatccatatttggagaacatcccatatgaatattgtgggattataaaactgatagatttatcaaaatatttgaatacttacgttacccaatctaaggaaatcaagctacgtgaagagcgttctcagcatatgaagaatgcggataatcgattagatttcaaaatatgtttgacatgtggtgtcaaagtgcatttaagagcggaccgccatgaaatgaccaagcatttgaataaaaattgttttaaaccatttggcgccttcctgatgcccaattcaagtgaagtttgtctccatttgacacagcctccttctaatatttttatatctgcaccatatctaaattcgcatggtgaagttggtagaaatgccatgagaagaggtgatttaaccaccttgaatttgaaaagatatgagcacttaaacagattatggattaacaatgaaattccaggttatattagtagagtaatgggtgacgaatttcgagtgactatactttccaatggtttcttgtttgcatttaatagagaaccaaggccaagaagaatacctccaacagatgaagatgatgaagatatggaagagggagaagacgggttttttacggagggaaatgacgaaatggatgttgatgatgaaactggacaggccgccaacttatttggggttggcgcagaaggtattgctggtggcggagtacgtgattttttccaattcttcgaaaactttaggaacactctacaaccgcagggaaatggcgatgatgatgcacctcagaatcccccaccaatattgcagttcttaggacctcaatttgatggagctactatcataagaaatacaaatccaagaaacctcgatgaggatgactctgatgataatgatgactctgatgagcgagagatttggtag

SEQ ID NO: 230 - DNA, 2037 bp, Saccharomyces cerevisiae
atgcactctcatagacaaaagtggggccgccagacggatatagcgagggtgctcgacgatatagaacacgacctctatctaccgcaacggctatcactcgatggtgcaactggtactgacgaatcacatgtgcaatacggtatagtcaaagactgctctgtgcttacgtgtggctgctgtatatctgaatcgctattcaatgatttatgcagggaaacttcgaacaagcaaactgcgtgtcccatctgtcagcgagaaaatgttcgactactttcagccatcaagccgctgcgagatttggctcgtcagattgacttcttcagaagtactaccggacagggcgaaagcgaaagcgatgagctccccgctatagtaaagacttcaccatcatcatcatcactatcgctaacgccatcgcgctcttcctccactgctgggctagaagctgataacaagacactatcagaccctacagttaaggagaaatcatcactgctcgaactcttccatattgtggcttcgaagatgcataatgcgaatacagaggtagggtcggaccacccactcacgactggcaccacccgtgatcaagaagaacacaccactaaggagaattactcaagcagcttactcgagcccaactatgacgaccacgcgaactggaaaatcctggataatgcctcgaacacaagaactgtgccgatagataacaacttctctttgatgtctacggacgttacaataccttccacagcaaactaccaaacaaatagtgcacatgatctggacgaagaaaaggagtacttttttgccaactgtttccccatgtacagaaaaaaatttcagttcaacacacaccccaaattcctagggacgaaatccaaattattcatcaaccaaagcatttctcccgattgcaccaaatttgctctaattactgaacacaagtgggaaatttattcgattaatccgaaggacaactctcctcaactagtatcatgtggcaagtctagtggagaatatggtcccaacttcaaccaactaacagagcaatcgtcatcttcactctccactacttctcaagcgtcaaaaaagaaaaagaaaaactggagccaacgtttttgcaaactttccaatgatttcttgataatatcgggttcgcaaaacattcttaatgtacacgacatacaccaaaacggcaaactcatctatacctacgtgtcgagattccccatccgatgcatagacatagatccaaggtcgcagataatagcctacggaatcaccggaaaggatagacatacaggcgcggaacaagcattagtcgtgatccaacaaattaccagaaataaagtgactttggagcccgagttccccccaccaatcaccataacacttccatacagagatcccatcaataccatacaactttcgcacgacgccaagtatctgacatgttcgaccgcgctagagtcgcggttcttgatcatatctttgcagaaaataaacgaaccaagactgataatgaaaagtgttcggtccatagacacttccttagaatctgaaggtatcactgacacaaaacttttcccaggaaatccaaatctgatgtgtatcacatcaacagcattcaattcatctccactggtcataaacaccaaaatcacccaaattaacggtgtacggaccgtggcacaaccatccatgcttataagggtagatgagattggatgcaagattcacaagtgcgaaatatcaccaagaaacgacgcaattgccttcctcgaccgcaacggatcagtttacatcatgtgtgcccccaccatgatggacaacaacgaaaaaagaaggacaatcctcgttgaaaccgtggcaaatgcctacagggcttatgaatcagctactttgcggtttaacccagagggcaacaagctttatattctcgacagaaaggggactttctttgtggaagactttgcatatggcttgccccaatctcgcgaaatcaccaaatgtaagcaaatattccacaaataa

SEQ ID NO: 231 - protein, 731 aa, Saccharomyces cerevisiae
MDKLVVNYYEYKHPIINKDLAIGAHGGKKFPTLGAWYDVINEYEFQTRCPIILKNSHRNKHFTFACHLKNCPFKVLLSYAGNAASSETSSPSANNNTNPPGTPDHIHHHSNNMNNEDNDNNNGSNNKVSNDSKLDFVTDDLEYHLANTHPDDTNDKVESRSNEVNGNNDDDADANNIFKQQGVTIKNDTEDDSINKASIDRGLDDESGPTHGNDSGNHRHNEEDDVHTQMTKNYSDVVNDEDINVAIANAVANVDSQSNNKHDGKDDDATNNNDGQDNNTNNDHNNNSNINNNNVGSHGISSHSPSSIRDTSMNLDVFNSATDDIPGPFVVTKIEPYHSHPLEDNLSLGKFILTKIPKILQNDLKFDQILESSYNNSNHTVSKFKVSHYVEESGLLDILMQRYGLTAEDFEKRLLSQIARRITTYKARFVLKKKKMGEYNDLQPSSSSNNNNNNDGELSGTNLRSNSIDYAKHQEISSAGTSSNTTKNVNNNKNDSNDDNNGNNNNDASNLMESVLDKTSSHRYQPKKMPSVNKWSKPDQITHSDVSMVGLDESNDGGNENVHPTLAEVDAQEARETAQLAIDKINSYKRSIDDKNGDGHNNSSRNVVDENLINDMDSEDAHKSKRQHLSDITLEERNEDDKLPHEVAEQLRLLSSHLKEVENLHQNNDDDVDDVMVDVDVESQYNKNTTHHNNHHSQPHHDEEDVAGLIGKADDEEDLSDENIQPELRGQ

SEQ ID NO: 232 - protein, 770 aa, Saccharomyces cerevisiae
MDNVVDPWYINPSGFAKDTQDEEYVQHHDNVNPTIPPPDNYILNNENDDGLDNLLGMDYYNIDDLLTQELRDLDIPLVPSPKTGDGSSDKKNIDRTWNLGDENNKVSHYSKKSMSSHKRGLSGTAIFGFLGHNKTLSISSLQQSILNMSKDPQPMELINELGNHNTVKNNNDDFDHIRENDGENSYLSQVLLKQQEELRIALEKQKEVNEKLEKQLRDNQIQQEKLRKVLEEQEEVAQKLVSGATNSNSKPGSPVILKTPAMQNGRMKDNAIIVTTNSANGGYQFPPPTLISPRMSNTSINGSPSRKYHRQRYPNKSPESNGLNLFSSNSGYLRDSELLSFSPQNYNLNLDGLTYNDHNNTSDKNNNDKKNSTGDNIFRLFEKTSPGGLSISPRINGNSLRSPFLVGTDKSRDDRYAAGTFTPRTQLSPIHKKRESVVSTVSTISQLQDDTEPIHMRNTQNPTLRNANALASSSVLPPIPGSSNNTPIKNSLPQKHVFQHTPVKAPPKNGSNLAPLLNAPDLTDHQLEIKTPIRNNSHCEVESYPQVPPVTHDIHKSPTLHSTSPLPDEIIPRTTPMKITKKPTTLPPGTIDQYVKELPDKLFECLYPNCNKVFKRRYNIRSHIQTHLQDRPYSCDFPGCTKAFVRNHDLIRHKISHNAKKYICPCGKRFNREDALMVHRSRMICTGGKKLEHSINKKLTSPKKSLLDSPHDTSPVKETIARDKDGSVLMKMEEQLRDDMRKHGLLDPPPSTAAHEQNSNRTLSNETDAL

SEQ ID NO: 233 - protein, 142 aa, Saccharomyces cerevisiae
MADQVPVTTQLPPIKPEHEVPLDAGGSPVGNMGTNSNNNNELGDVFDRIKTHFPPAKVKKIMQTDEDIGKVSQATPVIAGRSLEFFIALLVKKSGEMARGQGTKRITAEILKKTILNDEKFDFLREGLCVEEGQTQPEEESA

SEQ ID NO: 234 - protein, 149 aa, Saccharomyces cerevisiae
MNLQNNVLNQIHQILLPTNPTLDKPNAEATKEEFSSAENRDEKDYLTNQQPKNLSTPSTSSNGEFIPHIFYSLHQIRKDPNNLSNQLETLTGSIRHRLKLCKSLISENEDTKDLLSKSPSEWQDIIHQREQELQIKRDVLDDLYRKLQR

SEQ ID NO: 235 - protein, 1021 aa, Saccharomyces cerevisiae
SSKKEYMDSMNEKVAVMRNTYNTRKNAVTAAAANNNIKPVEQHHINNLKNSGNSANNMNVNMNLNPQMFLNQQAQARQQVAQQLRNQQQQQQQQQQQQRRQLTPQQQQLVNQMKVAPIPKQLLQRIPNIPPNINTWQQVTALAQQKLLTPQDMEAAKEVYKIHQQLLFKARLQQQQAQAQAQANNNNNGLPQNGNINNNINIPQQQQMQPPNSSANNNPLQQQSSQNTVPNVLNQINQIFSPEEQRSLLQEAIETCKNFEKTQLGSTMTEPVKQSFIRKYINQKALRKIQALRDVKNNNNANNNGSNLQRAQNVPMNIIQQQQQQNTNNNDTIATSATPNAAAFSQQQNASSKLYQMQQQQQAQAQAQAQAQAQAQAQAQAQAAQAAQAQAQAQAQAQAQAQAQAQAQAQAQAQAQAQAQAHAQHQPSQQPQQAQQQPNPLHGLTPTAKDVEVIKQLSLDASKTNLRLTDVTNSLSNEEKEKIKMKLKQGQKLFVQVSNFAPQVYIITKNENFLKEVFQLRIFVKEILEKCAEGIFVVKLDTVDRLIIKYQKYWESMRIQILRRQAILRQQQQMANNNGNPGTTSTGNNNNIATQQNMQQSLQQMQHLQQLKMQQQQQQQQQQQQQQQQQQQQQQQHIYPSSTPGVANYSAMANAPGNNIPYMNHKNTSSMDFLNSMENTPKVPVSAAATPSLNKTINGKVNGRTKSNTIPVTSIPSTNKKLSISNAASQQPTPRSASNTAKSTPNTNPSPLKTQTKNGTPNPNNMKTVQSPMGAQPSYNSAIIENAFRKEELLLKDLEIRKLEISSRFKHRQEIFKDSPMDLFMSTLGDCLGIKDEEMLTSCTIPKAVVDHINGSGKRKPTKAAQRARDQDSIDISIKDNKLVMKSKFNKSNRSYSIALSNVAAIFKGIGGNFKDLSTLVHSSSPSTSSNMDVGNPRKRKASVLEISPQDSIASVLSPDSNIMSDSKKIKVDSPDDPFMTKSGATTSEKQEVTNEAPFLTSGTSSEQFNVWDWNNWTSAT

SEQ ID NO: 236 - protein, 439 aa, Saccharomyces cerevisiae
MVTKHQIEEDHLDGATTDPEVKRVKLENNVEEIQPEQAETNKQEGTDKENKGKFEKETERIGGSEVVTDVEKGIVKFEFDGVEYTFKERPSVVEENEGKIEFRVVNNDNTKENMMVLTGLKNIFQKQLPKMPKEYIARLVYDRSHLSMAVIRKPLTVVGGITYRPFDKREFAEIVFCAISSTEQVRGYGAHLMNHLKDYVRNTSNIKYFLTYADNYAIGYFKKQGFTKEITLDKSIWMGYIKDYEGGTLMQCSMLPRIRYLDAGKILLLQEAALRRKIRTISKSHIVRPGLEQFKDLNNIKPIDPMTIPGLKEAGWTPEMDALAQRPKRGPHDAAIQNILTELQNHAAAWPFLQPVNKEEVPDYYDFIKEPMDLSTMEIKLESNKYQKMEDFIYDARLVFNNCRMYNGENTSYYKYANRLEKFFNNKVKEIPEYSHLID

SEQ ID NO: 237 - protein, 785 aa, Saccharomyces cerevisiae
MVCTSTSSNFYSIAQYILQSYFKVNVDSLNSLKLVDLIVDQTYPDSLTLRKLNEGATGQPYDYFNTVSRDADISKCPIFALTIFFVIRWSHPNPPISIENFTTVPLLDSNFISLNSNPLLYIQNQNPNSNSSVKVSRSQTFEPSKELIDLVFPWLSYLKQDMLLIDRTNYKLYSLCELFEFMGRVAIQDLRYLSQHPLLLPNIVTFISKFIPELFQNEEFKGIGSIKNSNNNALNNVTGIETQFLNPSTEEVSQKVDSYFMELSKKLTTENIRLSQEITQLKADMNSVGNVCNQILLLQRQLLSGNQAIGSKSENIVSSTGGGILILDKNSINSNVLSNLVQSIDPNHSKPNGQAQTHQRGPKGQSHAQVQSTNSPALAPINMFPSLSNSIQPMLGTLAPQPQDIVQKRKLPLPGSIASAATGSPFSPSPVGESPYSKRFKLDDKPTPSQTALDSLLTKSISSPRLPLSTLANTAVTESFRSPQQFQHSPDFVVGGSSSSTTENNSKKVNEDSPSSSSKLAERPRLPNNDSTTSMPESPTEVAGDDVDREKPPESSKSEPNDNSPESKDPEKNGKNSNPLGTDADKPVPISNIHNSTEAANSSGTVTKTAPSFPQSSSKFEIINKKDTKAGPNEAIKYKLSRENKTIWDLYAEWYIGLNGKSSIKKLIENYGWRRWKVSEDSHFFPTRRIIMDYIETECDRGIKLGRFTNPQQPREDIRKILVGDLEKFRINNGLTLNSLSLYFRNLTKNNKEICIFENFKNWNVRSMTEEEKLKYCKRRHNTPS

SEQ ID NO: 238 - protein, 1648 aa, Saccharomyces cerevisiae
MSMFNALNSNIEGEQYEAEEHSRELQIEQSFNILQDALIDLKNKDFEKSDSKFQELFQIDVVKPDRWGMYRNSSPTLDNLRYLCYRNRGMYYHLYLENNYERLNSQELVNCILKAVENLVESIQHSDADFAVTDLLARIFKSFNSVKLERLISEYEFTKQENLSLLLGRHRKFLLNDLTLMMNNYVELTNKLLVPNLSDNTIFERYHLEKYKDIKPEPLAFGPILSRISEMKKQDEEIMKKLDVFNVTLNEESWDEVAKALKNLLPSVKTSSLIGRNMDPYNEIEEPIEAVKFELSEAINNTPSLDRESERQEEEQDNESVRADDKSGNLAPSDIQTNEEARPNKRTDEHIDSTKPLQRSSKRFKEREQENSKELVMDVHKRFFGEFNTLLSYIHILPFCDFDTFASKFIIGSSDKQPEKFIPYTDLYECLKSWSSRYTDIFNQNDYLSSGSNENEELFQLNALLKSNAFDDKESFPRYLNDLDSDHIRSFISEVNAGNLHFHQVRLKLLFKLLGTYDEGNGRRLIIDYLWESQLLKIVLWFVFGIESNIFALINKNKRQCKYLALSIYELLVNHLGNIVEEITNKRIQGHKSADLKSQRNKVEKRIRSWHTLLEQIADEKDKELYVHFQWTHYCFLQYTCDIVDSRLSETLTSLENTIKDSDSSLDIAYPNYRHIPALNLNTVQSQKRKIRIIQNITVEDISEDTNSDTHSENHLETLEKVLLHILHPSTNHSNIDEEMVSFIFNSPFLLKIRLWGVLFSSYVKKSSIQDVQRIYFHVLDFMKGALTSPVYKESNPHGRHQMLLTVLTAIGYLSSQLTAILNSNRWESSDFVLEDYMFEKLLQTFFFFYTVLFYESSAVNDVSNKSFFKRASKSSGKMKDIMIDLATLILYYYDLQAKLRTPAEQGIETTELIWSLHTLFGHFHFCDASNGKFLDLAEKLLCQFINNDSFLQLKQILWCRYHYAIASDNFSPDLHDTKAVEMEKIHSLPLGTYLIKLQYQNKNPYLSSSKTTLKQIMDNIIEKIGDPSTLDNHIISRNSFLLNEYLSRPITADLLKHTFSGATSLYLTSPNDELQQGMTAGLFYVSSLQSLGLYKMRKKSMQARPSELDSIIRMLKNDIIYNTNRFESWILLGKCYSYIVEDDLIWTSDKITVPEKKDVIALTQRKAILCYLMAISIYYSKLDRTIDDKKIILEALDDLGSMLISGYYNPMNKLCFSWKSSAENTMRLSETGEVVMEKTKKITTISDFNIEQSIFLCFNRACSLSGDIKSQDDVFVLNWSSFYNLAKFFFKTDGGNNCKLVAKYITQGCQIAYESSPAKDPIIEPHYLLVNACYKWVKRGVIGVNEALTLLSKDNQFFQEQEEFWVNDEGLAWDYQEKFFFDKIIRLLRHLLSVDKKKWQHRPRYRIARILFDDLGDVNGALEEMDSLISAKSINKNLVNIWKPDFERPGKHFIYTYQYLVLYLDLLFAIKDFNTTGLVIKKLRRFGSGTVNVNELLERAINVYTQSAKIKLQLQDKSYVEQILPTLNYQEFLKISEQLNQVFDQGKYPEEISSGLKLAFQLKKGHSGIAFDSVCLGIYFEYLYFPLARQDQSLTDVNDENNPALPSSGSVTSKSTPDPTSKPSAIKKRVTKKEVFDRVRLLVDKIT

SEQ ID NO: 239 - protein, 833 aa, Saccharomyces cerevisiae
MNNAANTGTTNESNVSDAPRIEPLPSLNDDDIEKILQPNDIFTTDRTDASTTSSTAIEDIINPSLDPQSAASPVPSSSFFHDSRKPSTSTHLVRRGTPLGIYQTNLYGHNSRENTNPNSTLLSSKLLAHPPVPYGQNPDLLQHAVYRAQPSSGTTNAQPRQTTRRYQSHKSRPAFVNKLWSMLNDDSNTKLIQWAEDGKSFIVTNREEFVHQILPKYFKHSNFASFVRQLNMYGWHKVQDVKSGSIQSSSDDKWQFENENFIRGREDLLEKIIRQKGSSNNHNSPSGNGNPANGSNIPLDNAAGSNNSNNNISSSNSFFNNGHLLQGKTLRLMNEANLGDKNDVTAILGELEQIKYNQIAISKDLLRINKDNELLWQENMMARERHRTQQQALEKMFRFLTSIVPHLDPKMIMDGLGDPKVNNEKLNSANNIGLNRDNTGTIDELKSNDSFINDDRNSFTNATTNARNNMSPNNDDNSIDTASTNTTNRKKNIDENIKNNNDIINDIIFNTNLANNLSNYNSNNNAGSPIRPYKQRYLLKNRANSSTSSENPSLTPFDIESNNDRKISEIPFDDEEEEETDFRPFTSRDPNNQTSENTFDPNRFTMLSDDDLKKDSHTNDNKHNESDLFWDNVHRNIDEQDARLQNLENMVHILSPGYPNKSFNNKTSSTNTNSNMESAVNVNSPGFNLQDYLTGESNSPNSVHSVPSNGSGSTPLPMPNDNDTEHASTSVNQGENGSGLTPFLTVDDHTLNDNNTSEGSTRVSPDIKFSATENTKVSDNLPSFNDHSYSTQADTAPENAKKRFVEEIPEPAIVEIQDPTEYNDHRLPKRAKK

SEQ ID NO: 240 - protein, 597 aa, Saccharomyces cerevisiae
MNTGISPKQDDASNSNLLNIGQDHSLQYQGLEHNDSQYRDASHQTPHQYLNQFQAQPQQQQQQQQQQQQQQQQAPYQGHFQQSPQQQQQNVYYPLPPQSLTQPTSQSQQQQQQQQQQQYANSNSNSNNNVNVNALPQDFGYMQQTGSGQNYPTINQQQFSEFYNSFLSHLTQKQTNPSVTGTGASSNNNSNNNNVSSGNNSTSSNPAQLAASQLNPATAAAAAANNAAGPASYLSQLPQVQRYYPNNMNALSSLLDPSSAGNAAGNANTATHPGLLPPNLQPQLTHHQQQMQQQLQLQQQQQLQQQQQLQQQHQLQQQQQLQQQHHHLQQQQQQQQHPVVKKLSSTQSRIERRKQLKKQGPKRPSSAYFLFSMSIRNELLQQFPEAKVPELSKLASARWKELTDDQKKPFYEEFRTNWEKYRVVRDAYEKTLPPKRPSGPFIQFTQEIRPTVVKENPDKGLIEITKIIGERWRELDPAKKAEYTETYKKRLKEWESCYPDENDPNGNPTGHSHKAMNMNLNMDTKIMENQDSIEHITANAIDSVTGSNSNSTNPNTPVSPPISLQQQPLQQQQQQQQQQQHMLLADPTTNGSIIKNE

SEQ ID NO: 241 - protein, 431 aa, Saccharomyces cerevisiae
MVVQNSPVSSVHTANFSERGSNTRTMTYKNKLTVCFDDILKVGAEMMMQQQLKNVQLDSYLVNGFSQSQQKLLKEKVKLFHGILDDLETSLSQSSSYLETLTALGKEKEKEREEAEKKRAEQENMRKVREQEELKKRQELEEASQQQQLQQNSKEKNGLGLNFSTTAPANTTDANGSKENYQELGSLQSSSQTQLENANAANNGAAFSPLTTTRIQSQQAQPSDVMFNDLNSMDISMFSGLDSTGFDSTAFNATVDETKGFDDNDSGNNYNDINISSIENNINNNINSTKNGKDNNNESNKNNNGDEKNKNNNEDNENNNNSSEKNNNNNNNNNNNNDDNGNNNNNNSGNDNNNTTNNDSNNKNNSITTGNDNENIVNNDLPTTVVSNPGDNPPPADNGEEYLTLNDFNDLNIDWSTTGDNGELDLSGFNI

SEQ ID NO: 242 - protein, 131 aa, Saccharomyces cerevisiae
NSQGGNIKVKKENALPKPPKSSKSKPQDRRNSTGEKRFKCAKCSLEFSRSSDLRRHEKTHFAILPNICPQCGKGFARKDALKRHYDTLTCRRNRTKLLTAGGEGINELLKKVKQSNIVHRQDNNHNGSSNG

SEQ ID NO: 243 - protein, 672 aa, Saccharomyces cerevisiae
MKQEQSHEGDSYSTEFINLFGKDTATHPSSNNGANNNGMGSTNSLDQFVATASSSSSLVTSSENRRPLIGDVTNRGNTNLYDHAVTPEILLEQLAYVDNFIPSLDNEFSNVDWNVNTTHNNANNNGADTFSSINANPFDLDEQLAIELSAFADDSFIFPDEDKPSNNNNNSNNGNDDHSNHDVLHEDPSTNNRQRNPHFLTQRRNTFLTSQYDQSKSRFSSKNKRNGNNGETNNFGDNMQNNHPFEPNFMGSPSQFPADATNMTSIDHGGFTNVDITSTENNTTGDNGVDALSNLLHRTTHTPNRSSPLSNVTSAQNSSSQQRKHSESKVDSNSDNNSSNKAPNITVPDYSIIPTSVLVTLLPRVNVPNGAYNSLISAGFDNDQIDAIAAIMAYHHQKKIRENNSNNNKNINTNDSQEAPILKNINELLSVLIPPSPAETAAPTTLSTSPSFNEHGVVAEASFLSSILELGIKHPKSNNIHNQRQPSRNDHKISRESDGNNGNDNVHHNNAVIKSSTTRGDEIAKIRSEPTLNASSSDHKENSLKRSHSGDLKNKKVPVDRKYSDNEDDEYDDADLHGFEKKQLIKKELGDDDEDLLIQSKKSHQKKKLKEKELESSIHELTEIAASLQKRIHTLETENKLLKNLVLSSGETEGIKKAESLKKQIFEKVQKE

SEQ ID NO: 244 - protein, 758 aa, Saccharomyces cerevisiae
MDNTTNINTNERSSNTDFSSAPNIKGLNSHTQLQFDADSRVFVSDVMAKNSKQLLYAHIYNYLIKNNYWNSAAKFLSEADLPLSRINGSASGGKTSLNASLKQGLMDIASKGDIVSEDGLLPSKMLMDANDTFLLEWWEIFQSLFNGDLESGYQQDHNPLRERIIPILPANSKSNMPSHFSNLPPNVIPPTQNSFPVSEESFRPNGDGSNFNLNDPTNRNVSERFLSRTSGVYDKQNSANFAPDTAINSDIAGQQYATINLHKHFNDLQSPAQPQQSSQQQIQQPQHQPQHQPQQQQQQQQQQQQQQQQQQQQQQQQQQQQQQHQQQQQTPYPIVNPQMVPHIPSENSHSTGLMPSVPPTNQQFNAQTQSSMFSDQQRFFQYQLHHQNQGQAPSFQQSQSGRFDDMNAMKMFFQQQALQQNSLQQNLGNQNYQSNTRNNTAEETTPTNDNNANGNSLLQEHIRARFNKMKTIPQQMKNQSTVANPVVSDITSQQQYMHMMMQRMAANQQLQNSAFPPDTNRIAPANNTMPLQPGNMGSPVIENPGMRQTNPSGQNPMINMQPLYQNVSSAMHAFAPQQQFHLPQHYKTNTSVPQNDSTSVFPLPNNNNNNNNNNNNNNNNNSNNSNNNNNNNNNNNNSNNTPTVSQPSSKCTSSSSTTPNITTTIQPKRKQRVGKTKTKESRKVAAAQKVMKSKKLEQNGDSAATNFINVTPKDSGGKGTVKVQNSNSQQQLNGSFSMDTETFDIFNIGDFSPDLMDS

SEQ ID NO: 245 - protein, 1047 aa, Saccharomyces cerevisiae
MVENSTQKAPHAGNDDNSSTKPYSEAFFLGFNNPTPGLEAEHSSTSPAPENSETHNRKRNRILFVCQACRKSKTKCDREKPECGRCVKHGLKCVYDVSKQPAPRIPSKDAIISRLEKDMFYWKDKAMKLLTEREVNESGKRSASPINTNNASGDSPDTKKQHKMEPIYEQSGNGDINNGTRNDIEINLYRSHPTMIMSKVMKREVKPLSENYIIIQDCFLKILVTSVFLDTSKNTMIPALTANANITRAQPSVANNLLKLKEMLIRQCQTEDEKNRVNEFTDRILQNTNSNRNLKIGMLLSMLYNSVGYQYLEDHCPQGGEYSDLLRNLINECEAILPSYEIIERYKNHFYEYVYPSLPFIELEIFEESLSQTIFPDPNNPSKVQIRMGSTHLRAKVENLSLLLVILKLSYMSIRFLDHSTADSSFYLSKEIIDKYPIPNDFILLSQRCLASENWCACANENIISCLLYIWSFFAFSPEEGDFFLEHPTDVISSLIMMLSTSIGLHRDPSDFPQLISPSTSDKRTLNHRRILWLSIVTVCSFEASLKGRHSVSPISLMALFLNIKDPDSLTVYMNRVRGDLSDINNHKLLRIHKFTFKRAQLALLLSDLDNLTMTYYGSFHLHSIEFIREKIEIFVEENFPIVPLKSVAQDKSDLDDMNVISEMNILSSENSSSFHNRIMNKLLMLRTSMAVFLHFETLITKDKSIFPFYKKYFMVSCMDALSLINYFNKFFNGEYRHAISSLTSFNVTKFIQLALSSTIFSLLGIILRIGLAIHMLSSEVQKLSGTTDPRIKELNTKVEKFSTLQRDLESALEGIYCSASEHLRFTYFPVFKMLALFDVIVQRMRKGELWHGIFTMIQMEQMHSRIIKTLSITLGVKLDKKDRLLEELMACNHVANFSVEDIDELNRNIKKEIQISSGLKPPVNTIDLTNGEPFGNAVPTFTKTWSSSLDNLEKLSSAAAVGQSLDYNSGLRQGPLAGGGSKEQTPIAGMNNLNNSINATPIVDNSSGSQLPNGFDRGQANNTPFPGYFGGLDLFDYDFLFGNDFA

SEQ ID NO: 246 - protein, 531 aa, Saccharomyces cerevisiae
MASTELSLKRTLTDILEDELYHTNPGHSQFTSHYQNYHPNASITPYKLVNKNKENNTFTWNHSLQHQNESSAASIPPQQTYHFPIFNKYADPTLTTTTSFTTSEATANDRQINNVHLIPNEIKGASETPLQKTVNLKNIMKVSDPYVPTRNTFNYDVKISNDFFDNGDNLYGNDEEVLFYEDNYNPKMQWSLQDNSAAINNEDARAIFNNEFDSDDDDISDDEEDEIEENCLQQEQHQEEPLLSLDVTPISMFGSDQKTGRAKSSSHLFNEYSYVDSNMDSISSVVSEDLLDERGHEKIEDEDEDNDLDEDDIYDISLLKNRRKQSFVLNKNTIDFERFPSPSTSANVPSTATTGKRKPAKSSSNRSCVSNSNENGTLERIKKPTSAVVSSNASRRKLINYTKKHLSSHSSTNSNSKPSTASPSAHTSSSDGNNEIFTCQIMNLITNEPCGAQFSRSYDLTRHQNTIHAKRKIVFRCSECIKILGSEGYQKTFSRLDALTRHIKSKHEDLSLEQRQEVTKFAKANIGYVMG

SEQ ID NO: 247 - protein, 486 aa, Saccharomyces cerevisiae
MMNNNESEAENQRLLDELMNQTKVLQETLDFSLVTPTPHHNDDYKIHGSAYPGGETPAQQHEKLSYINTHNSNDNNNLMGSQARSNSQTPTASTIYEEAESQSSYLDDMFRTSQGGRPVTQNSISSIGQGPLRSSYSMAYDSPVDRAMNTPLQQQEGLKAELPHDFLFQHGTDDTMYNLTDDLSSSLSSSINSDMMTPNTYSSSFSYNPQSLGPASVSSTYSPKVRSPSSSFRAGSFLSSSFRHGSINTPRTRHTSISSNMTENIGPGSVPKILGGLTSDEKLRRKREFHNAVERRRRELIKQKIKELGQLVPPSLLNYDDLGKQIKPNKGIILDRTVEYLQYLAEILEIQARKKKALLAKIKELEEKKSSVAALSPFTNNHHASSGQNNSENSEERIIDIRSVPNALMNEQNSKAELHNWEPPLYDSVGNHNHAGTMESHPHTNIHEELKEFLSGDLIEAEDNAKLMFGDDNSNPADYLLEFGSG

SEQ ID NO: 248 - protein, 766 aa, Saccharomyces cerevisiae
MSEEETVSAPAPASTPAPAGTDVGSGGAAAGIANAGAEGGDGAEDVKKHGSKMLVGPRPPQNAIFIHKLYQILEDESLHDLIWWTPSGLSFMIKPVERFSKALATYFKHTNITSFVRQLNIYGFHKVSHDHSSNDANSGDDANTNDDSNTHDDNSGNKNSSGDENTGGGVQEKEKSNPTKIWEFKHSSGIFKKGDIEGLKHIKRRASSRNNSSINSRKNSSNQNYDIDSGARVRPSSIQDPSTSSNSFGNFVPQIPGANNSIPEYFNNSHVTYENANHAPLESNNPEMQEQNRPPNFQDETLKHLKEINFDMVKIIESMQHFISLQHSFCSQSFTFKNVSKKKSENIVKDHQKQLQAFESDMLTFKQHVMSRAHRTIDSLCAVNAAATAASVAPAPAPTSTSAYAPKSQYEMMVPPGNQYVPQKSSSTTNIPSRFNTASVPPSQLFVQYQPQSQQHVTYAKQPAHVPNFINQPIPIQQLPPQYADTFSTPQMMHNPFASKNNNKPGNTKRTNSVLMDPLTPAASVGVQGPLNYPIMNINPSVRDYNKPVPQNMAPSPIYPINEPTTRLYSQPKMRSLGSTSSLPNDRRNSPLKLTPRSSLNEDSLYPKPRNSLKSSISGTSLSSSFTLVANNPAPIRYSQQGLLRSLNKAANCAPDSVTPLDSSVLTGPPPKNMDNLPAVSSNLINSPMNVEHSSSLSQAEPAPQIELPQPSLPTTSTTKNTGEADNSKRKGSGVYSLLNQEDSSTSSADPKTEDKAAPALKKVKM

SEQ ID NO: 249 - protein, 683 aa, Saccharomyces cerevisiae
MDFTTMTMASNMATSTTTTATSAHASINSSSNFNIDIDSNQNTPSILINNNSDSSNGKNTDFNGVNNIHQKNIMNNTNNVHLYSPNIMDQTLLTPQDIAKLRRESIAHSQGMGGVSWGSISVGSWLRDEIISRRNSIVPASANGAASAAASATTTATNTLQIQQPTKRPSVSNPPYHRGYSISPQIAYTAYLPNLEKQYCKDYSCCGLSLPGLHDLLRHYEEAHISTSPNTTNMSQIPMNSAGNTSSSVRMTNNTSSANYNLQNNMAANTKNAGHKTNTMQAHSSNATNNTSINNMHANLQSNMDSNSTIRQSQHPHHQQNIIQQQLQSNSVNHTSGAVPTPSVMGSATASSTTANPNVISITGAPNSGLSMANHSQQLHLNGNLVDAVSTNDVFLRTSNSPSRHVPHNKQINSNNNSGININNNTSHNSNINMGSKNAMVNRPHTFNNYSLNKTSRNPIQHQSRKIDPHQTDLSPLVLVQDIDLSFMDDDILGPSNHNSMNSVVNPTTGSHNYNTFHSSVHAKSSQNMVEDQDIDDIDDDDDVDDDDDDDDDDDTENGSSSNGKSVHNNNYKMPQQAYIDDPARRLYVMDHEEQKPFKCPVIGCEKTYKNQNGLKYHRLHGHQNQKLHENPDGTFSVIDPDSTDSFGDGMGSAKDKPYRCEVCGKRYKNLNGLKYHRGHSTH

SEQ ID NO: 250 - protein, 647 aa, Saccharomyces cerevisiae
MSSEERSRQPSTVSTFDLEPNPFEQSFASSKKALSLPGTISHPSLPKELSRNNSTSTITQHSQRSTHSLNSIPEENGNSTVTDNSNHNDVKKDSPSFLPGQQRPTIISPPILTPGGSKRLPPLLLSPSILYQANSTTNPSQNSHSVSVSNSNPSAIGVSSTSGSLYPNSSSPSGTSLIRQPRNSNVTTSNSGNGFPTNDSQMPGFLLNLSKSGLTPNESNIRTGLTPGILTQSYNYPVLPSINKNTITGSKNVNKSVTVNGSIENHPHVNIMHPTVNGTPLTPGLSSLLNLPSTGVLANPVFKSTPTTNTTDGTVNNSISNSNFSPNTSTKAAVKMDNPAEFNAIEHSAHNHKENENLTTQIENNDQFNNKTRKRKRRMSSTSSTSKASRKNSISRKNSAVTTAPAQKDDVENNKISNNVTLDENEEQERKRKEFLERNRVAASKFRKRKKEYIKKIENDLQFYESEYDDLTQVIGKLCGIIPSSSSNSQFNVNVSTPSSSSPPSTSLIALLESSISRSDYSSAMSVLSNMKQLICETNFYRRGGKNPRDDMDGQEDSFNKDTNVVKSENAGYPSVNSRPIILDKKYSLNSGANISKSNTTTNNVGNSAQNIINSCYSVTNPLVINANSDTHDTNKHDVLSTLPHNN

SEQ ID NO: 251 - protein, 604 aa, Saccharomyces cerevisiae
MSANSPTGNDPHVFGIPVNATPSNMGSPGSPVNVPPPMNPAVANVNHPVMRTNSNSNANEGTRTLTREQIQQLQQRQRLLLQQRLLEQQRKQQALQNYEAQFYQMLMTLNKRPKRLYNFVEDADSILKKYEQYLHSFEFHIYENNYKICAPANSRLQQQQKQPELTSDGLILTKNNETLKEFLEYVARGRIPDAIMEVLRDCNIQFYEGNLILQVYDHTNTVDVTPKENKPNLNSSSSPSNNNSTQDNSKIQQPSEPNSGVANTGANTANKKASFKRPRVYRTLLKPNDLTTYYDMMSYADNARFSDSIYQQFESEILTLTKRNLSLSVPLNPYEHRDMLEETAFSEPHWDSEKKSFIHEHRAESTREGTKGVVGHIEERDEFPQHSSNYEQLMLIMNERTTTITNSTFAVSLTKNAMEIASSSSNGVRGASSSTSNSASNTRNNSLANGNQVALAAAAAAAAVGSTMGNDNNQFSRLKFIEQWRINKEKRKQQALSANINPTPFNARISMTAPLTPQQQLLQRQQQALEQQQNGGAMKNANKRSGNNATSNNNNNNNNLDKPKVKRPRKNAKKSESGTPAPKKKRMTKKKQSASSTPSSTTMS

SEQ ID NO: 252 - protein, 337 aa, Saccharomyces cerevisiae
MMDKHKYRVEIQQMMFVSGEINDPPVETTSLIEDIVRGQVIEILLQSNKTAHLRGSRSILPEDVIFLIRHDKAKVNRLRTYLSWKDLRKNAKDQDASAGVASGTGNPGAGGEDDLKKAGGGEKDEKDGGNMMKVKKSQIKLPWELQFMFNEHPLENNDDNDDMDEDEREANIVTLKRLKMADDRTRNMTKEEYVHWSDCRQASFTFRKNKRFKDWSGISQLTEGKPHDDVIDILGFLTFEIVCSLTETALKIKQREQVLQTQKDKSQQSSQDNTNFEFASSTLHRKKRLFDGPENVINPLKPRHIEEAWRVLQTIDMRHRALTNFKGGRLSSKPIIM

SEQ ID NO: 253 - protein, 1332 aa, Saccharomyces cerevisiae
MTERIPIKNYQRTNAKALLKLTEKLFNKNFFDLYLTSQQLVVLEYLLSISSEEDKLKAWDYFLKGNIALNVEKSFPLTQEEEHHGAVSPAVDTRSDDVSSQTIKDNNNTNTNTSISNENHVENEIEDKGDNAIANEDNFVNNDESDNVEEDLFKLDLEDLKQQISGTRFIGNLSLKIRYVLWQCAIDYIYCDRNEFGDENDTEYTLLDVEEKEEEEIGKNEKPQNKEGISKFAEDEDYDDEDENYDEDSTDVKNVDDPPKNLDSISSSNIEIDDERRLVLNISISKETLSKLKTNNVEEIMGNWNKIYHSFEYDKETMIKRLKLEESDKMIEKGKKKRSRSDLEAATDEQDRENTNDEPDTNQKLPTPEGSTFSDTGNKRPKQSNLDLTVNLGIENLSLKHLLSSIQQKKSQLGISDYELKHLIMDVRKNRSKWTSDERIGQEELYEACEKVVLELRNYTEHSTPFLNKVSKREAPNYHQIIKKSMDLNTVLKKLKSFQYDSKQEFVDDIMLIWKNCLTYNSDPSHFLRGHAIAMQKKSLQLIRMIPNITIRNRADLEKEIEDMEKDKDYELDEEEEVAGSGRKGLNMGAHMLAKENGKVSEKDSSKTVKDEAPTNDDKLTSVIPEGEKEKDKTASSTVTVHENVNKNEIKENGKNEEQDMVEESSKTEDSSKDADAAKKDTEDGLQDKTAENKEAGENNEEEEDDDDEDEDEDMVDSQSYLLEKDDDRDDLEISVWKTVTAKVRAEICLKRTEYFKNGKLNSDSEAFLKNPQRMKRFDQLFLEYKEQKALESYRQKIEQNSIMKNGFGTVLKQEDDDQLQFHNDHSLNGNEAFEKQPNDIELDDTRFLQEYDISNAIPDIVYEGVNTKTLDKMEDASVDRMLQNGINKQSRFLANKDLGLTPKMNQNITLIQQIRHICHKISLIRMLQSPLSAQNSRSNPNAFLNNHIYNYTIIDDSLDIDPVSQLPTHDYKNNRELIWKFMHKNISKVAMANGFETAHPSAINMLTEIAGDYLSNLIKTLKLHHETNSLNRGTNVEMLQTTLLENGINRPDDLFSYVESEFGKKTKKLQDIKQKLESFLRALLRPTLQELSERNFEDESQSFFTGDFASELTGEDFFGFRELGLEKEFGVLSSSVPLQLLTTQFQTVDGETKVQAKKIQPEESDSIVYKKITKGMLDAGSFWNTLLPLLQKDYERSKAYIAKQSKSSANDKTSMTSTEDNSFALLEEDQFVSKKTATKARLPPTGKISTTYKKKPIASAFILPEEDLENDVKADPTTTVNAKVGAENDGDSSLFLRTPQPLDPLDMDDAFDDTNMGSNSSFSLSLPRLNQ

SEQ ID NO: 254 - protein, 210 aa, Saccharomyces cerevisiae
MGKSAVIFVERATPATLTELKDALSNSILSVRDPWSIDFRTYRCSIKNLPADVSKLMYSITFHHHGRQTVLIKDNSAMVTTAAAADIPPALVFNGSSTGVPESIDTILSSKLSNIWMQRQLIKGDAGETLILDGLTVRLVNLFSSTGFKGLLIELQADEAGEFETKIAGIEGHLAEIRAKEYKTSSDSLGPDTSNEICDLAYQYVRALEL

SEQ ID NO: 255 - protein, 1427 aa, Saccharomyces cerevisiae
MNNGSGRYLLTPPDDLHPYVPSSKPQEQVYPDFKPWEHTAAEDQILANFVAKGFYHTPMVNFESISARSSVHESLVTQSNILSQQFDKIIKIREDHINKIPSNSTTTLHGPGFQLPNRITLTDHRKETWLHELSSSHTSLVKIGKFIPHGLKRRQVIEQCYLKFIPLKRAIWLIKCCYFIEWKSNHKKKRSNAAGADDAISMHLLKDWTDTFVYILEKLIFDMTNHYNDSQQLRTWKRQISYFLKLLGNCYSLRLINKEIFHHWLVEFINKMENFEFLPLSLHILMIFWNDICQIDTNAPVAATITSSQKEPFFLVTKITDMLLHKYYIVSSSKSMINDENYIINDIKKNNKIKLNILKILSSLILKIFQEQSLEVFIFPTSNWEIYKPLLFEIVSNADTNQNSDMKKKLELISYRNESLKNNSSIRNVIMSASNANDFQLTIVTCKQFPKLSCIQLNCIDTQFTKLLDDNPTEFDWPTYVDQNPLTMHKIIQLILWSIHPSRQFDHYESNQLVAKLLLLRINSTDEDLHEFQIEDAIWSLVFQLAKNFSAQKRVVSYMMPSLYRLLNILITYGIIKVPTYIRKLISSGLLYLQDSNDKFVHVQLLINLKISPLMKSQYNMVLRNVMEYDVKFYEIFNFDQLVEITEQIKMRILSNDITNLQLSKTPLSIKIMVAEWYLSHLCSGILSSVNRTVLLKIFKIFCIDLEVFHHFFKWIEFIVYHQLLSDIESLEALMDILLCYQKLFSQFINDHILFTKTFIFIYKKVLKEKDVPAYNVTSFMPFWKFFMKNFPFVLKVDNDLRIELQSVYNDEKLKTEKLKNDKSEVLKVYSMINNSNQAVGQTWNFPEVFQVNIRFLLHNSEIIDTNTSKQFQKARNNVMLLIATNLKEYNKFMSIFLKRKDFTNKNLIQLISLKLLTFEVTQNVLGLEYIIRLLPINLENNDGSYGLFLKYHKEQFIKSNFEKILLTCYELEKKYHGNECEINYYEILLKILITYGSSPKLLATSTKIIMLLLNDSVENSSNILEDILYYSTCPSETDLNDIPLGSGQPDNDTVVTNDDKSDDDDHTVDEIDHVEYYVMMDFANLWVFQAFTCFCIKKIMENNEPAMAMEDLKNFIFQIIEITNSNDLCSQIFDQLKDMQTIEMITQIVEKDFCTSCLQNNNQKIDDNYIVVVIEIITSLSMRFQRETSGMIVISMENYHLLIKIIRQLSELNEGNLSKREIQIDAVLKIFSFHQDSIFQRIIADLSADKPTSPFIDSICKLFDKISFNLRLKLFLYEILSSLKSFAIYSSTIDAPAFHTSGKVELPKKLLNLPPFQVSSFVKETKLHSGDYGEEEDADQEESFSLNLGIGIVEIAHENEQKWLIYDKKDHKYVCTFSMEPYHFISNYNTKYTDDMATGSNDTTAFNDSCVNLSLFDARFERKNPH

SEQ ID NO: 256 - protein, 1420 aa, Saccharomyces cerevisiae
MSSDASTYRLEDVLSSFYRVEKIKKINYHQYISKAQNDQWSIQMEFMLRKQDPKTLVALLSRDLWCFSINDDPVPTPPAIEHKPVSPDKIGTFTADYSKPNLPPHYALFLKALRRKIYINLALGSHNKLIQFGNACISLSGVPNYLVQLEPHLFVNGDLTVSLCAKNMGLVPMKEENLEESFLSKHALYLAPSGIRMHLAPASKQGYLITPPKHTELLLTTLSVSHGINLQNKKNLKWVAVVPDLGHLNGHTPTIASYLTPLLEAKKLVWPLHLIFAQPVADIENSTSGDPSEFHCLQDALDAIDDFIQLKQTAAYRTPGSSGVLSSNIAGTNPLSSDGAYTEQFQHYKNNSISSQPASYHSVQETNKISPKDFSPNFTGIDKLMLSPSDQFAPAFLNTPNNNINENELFNDRKQTTVSNDLENSPLKTELEANGRSLEKVNNSVSKTGSVDTLHNKEGTLEQREQNENLPSDKSDSMVDKELFGEDEDEDLFGDSNKSNSTNESNKSISDEITEDMFEMSDEEENNNNKSINKNNKEMHTDLGKDIPFFPSSEKPNIRTMSGTTKRLNGKRKYLDIPIDEMTLPTSPLYMDPGAPLPVETPRDRRKSVFAPLNFNPIIENNVDNKYKSGGKFSFSPLQKEEALNFDISMADLSSSEEEEDEEENGSSDEDLKSLNVRDDMKPSDNISTNTNIHEPQYINYSSIPSLQDSIIKQENFNSVNDANITSNKEGFNSIWKIPQNDIPQTESPLKTVDSSIQPIESNIKMTLEDNNVTSNPSEFTPNMVNSEISNLPKDKSGIPEFTPADPNLSFESSSSLPFLLRHMPLASIPDIFITPTPVVTISEKEQDILDLIAEQVVTDYNILGNLGIPKIAYRGVKDCQEGLITTTMLQLFSTFDRLNGNDTISKFYNMKQPYVFVKKHHELIKVKHDSQPFIKFLNFRPPNGIKNFKSLLLSSSFKEDCLSFAPTLSQTYINQELGFCELLKLTNEDPPGLMYLKAFDKNKLLLLAAQIVSYCSNNKNSIKNVPPILIILPLDNATLTELVDKANIFQVIKNEVCAKMPNIELYLKVIPMDFIRNVLVTVDQYVNVAISIYNMLPPKSVKFTHIAHTLPEKVNFRTMQQQQMQQQQQQQQQQQNNSTGSSSIIYYDSYIHLAYSRSVDKEWVFAALSDSYGQGSMTKTWYVGNSRGKFDDACNQIWNIALNLASKKFGKICLILTRLNGILPDDELMNWRRLSGRNIHLAVVCVDDNSKISFIDEDKLYPSFKPIYKDTRFGGRMDMTRLYDYEIRDIDQDIHGIVFQHPFPLAHSQHRCAIRSGALIKFKKCDGDTVWDKFAVNLLNCPHSDSTQLLETILEEFRNLAALNVWYGLSDGEDGHIPWHILAVKKMMNTLVHTRVKIANTSAATVHTATSSSIILSDK

SEQ ID NO: 257 - protein, 519 aa, Saccharomyces cerevisiae
MPSTTLLFPQKHIRAIPGKIYAFFRELVSGVIISKPDLSHHYSCENATKEEGKDAADEEKTTTSLFPESNNIDRSLNGGCSVIPCSMDVSDLNTPISITLSPENRIKSEVNAKSLLGSRPEQDTGAPIKMSTGVTSSPLSPSGSTPEHSTKVLNNGEEEFICHYCDATFRIRGYLTRHIKKHAIEKAYHCPFFNSATPPDLRCHNSGGFSRRDTYKTHLKARHVLYPKGVKPQDRNKSSGHCAQCGEYFSTIENFVENHIESGDCKALPQGYTKKNEKRSGKLRKIKTSNGHSRFISTSQSVVEPKVLFNKDAVEAMTIVANNSSGNDIISKYGNNKLMLNSENFKVDIPKRKRKYIKKKQQQVSGSTVTTPEVATQNNQEVAPDEISSATIFSPFDTHLLEPVPSSSSESSAEVMFHGKQMKNFLIDINSFTNQQQQAQDNPSFLPLDIEQSSYDLSEDAMSYPIISTQSNRDCTQYDNTKISQILQSQLNPEYLSENHMRETQQYLNFYNDNFGSQF

SEQ ID NO: 258 - protein, 1093 aa, Saccharomyces cerevisiae
MPFDVLISNQKDNTNHQNITPISKSVLLAPHSNHPVIEIATYSETDVYECYIRGFETKIVMRRTKDDWINITQVFKIAQFSKTKRTKILEKESNDMQHEKVQGGYGRFQGTWIPLDSAKFLVNKYEIIDPVVNSILTFQFDPNNPPPKRSKNSILRKTSPGTKITSPSSYNKTPRKKNSSSSTSATTTAANKKGKKNASINQPNPSPLQNLVFQTPQQFQVNSSMNIMNNNDNHTTMNFNNDTRHNLINNISNNSNQSTIIQQQKSIHENSFNNNYSATQKPLQFFPIPTNLQNKNVALNNPNNNDSNSYSHNIDNVINSSNNNNNGNNNNLIIVPDGPMQSQQQQQHHHEYLTNNFNHSMMDSITNGNSKKRRKKLNQSNEQQFYNQQEKIQRHFKLMKQPLLWQSFQNPNDHHNEYCDSNGSNNNNNTVASNGSSIEVFSSNENDNSMNMSSRSMTPFSAGNTSSQNKLENKMTDQEYKQTILTILSSERSSDVDQALLATLYPAPKNFNINFEIDDQGHTPLHWATAMANIPLIKMLITLNANALQCNKLGFNCITKSIFYNNCYKENAFDEIISILKICLITPDVNGRLPFHYLIELSVNKSKNPMIIKSYMDSIILSLGQQDYNLLKICLNYQDNIGNTPLHLSALNLNFEVYNRLVYLGASTDILNLDNESPASIMNKFNTPAGGSNSRNNNTKADRKLARNLPQKNYYQQQQQQQQPQNNVKIPKIIKTQHPDKEDSTADVNIAKTDSEVNESQYLHSNQPNSTNMNTIMEDLSNINSFVTSSVIKDIKSTPSKILENSPILYRRRSQSISDEKEKAKDNENQVEKKKDPLNSVKTAMPSLESPSSLLPIQMSPLGKYSKPLSQQINKLNTKVSSLQRIMGEEIKNLDNEVVETESSISNNKKRLITIAHQIEDAFDSVSNKTPINSISDLQSRIKETSSKLNSEKQNFIQSLEKSQALKLATIVQDEESKVDMNTNSSSHPEKQEDEEPIPKSTSETSSPKNTKADAKFSNTVQESYDVNETLRLATELTILQFKRRMTTLKISEAKSKINSSVKLDKYRNLIGITIENIDSKLDDIEKDLRANA

SEQ ID NO: 259 - protein, 291 aa, Saccharomyces cerevisiae
MNSILDRNVRSSETTLIKPESEFDNWLSDENDGASHINVNKDSSSVLSASSSTWFEPLENIISSASSSSIGSPIEDQFISSNNEESALFPTDQFFSNPSSYSHSPEVSSSIKREEDDNALSLADFEPASLQLMPNMINTDNNDDSTPLKNEIELNDSFIKTNLDAKETKKRAPRKRLTPFQKQAHNKIEKRYRININTKIARLQQIIPWVASEQTAFEVGDSVKKQDEDGAETAATTPLPSAAATSTKLNKSMILEKAVDYILYLQNNERLYEMEVQRLKSEIDTLKQDQK

SEQ ID NO: 260 - protein, 528 aa, Saccharomyces cerevisiae
MNYGVEKLKLKYSKHGCITCKIRKKRCSEDKPVCRDCRRLSFPCIYISESVDKQSLKKIKADIQHQLISKKRKHAPDSAQKAAVATRTRRVGSDEQDNQVYLSKPLEDCISQKLDSMGLQLYNYYRSHLANIISIAPMNQNYYLNIFLPMAHENDGILFAILAWSANHLSISSSNELRKDEIFVNLANKYTYMSLSHLKTNEGSSACAKLGFLYSLAQILILCGSEICQGDVKFWKILLNIGKNLIENHVGKDVSRILTTTTEEPSLEERIIFPNFNSVVKYWLIVNFIYHDILNFNTTSFPIEQYEKFFQRDQNSLPSSANFIESIDSPIEEIDPLIGINKPILLLLGQVTNLTRFLQTMEQEEMLEHGDKILSLQVEIYKLQPSLMALEHLDDEKKFYYLELFEIMKISTLMFFQLTLLKIDKDSLELQILRNKLDSKLDKVIGTFLEGSLCFPLFIYGVCIQVEDMEKKIDLEAKFDDILKRYKCYNFQNARLLIRKIWQNEADGISEHDLVHMIDELDYNINFA

SEQ ID NO: 261 - protein, 836 aa, Saccharomyces cerevisiae
MLDKARSQSKHMDESNAAASLLSMETTANNHHYLHNKTSRATLMNSSQDGKKHAEDEVSDGANSRHPTISSASIESLKTTYDENPLLSIMKSTCAPNNTPVHTPSGSPSLKVQSGGDIKDDPKENDTTTTTNTTLQDRRDSDNAVHAAASPLAPSNTPSDPKSLCNGHVAQATDPQISGAIQPQYTATNEDVFPYSSTSTNSNTATTTIVAGAKKKIHLPPPQAPAVSSPGTTAAGSGAGTGSGIRSRTGSDLPLIITSANKNNGKTTNSPMSILSRNNSTNNNDNNSIQSSDSRESSNNNEIGGYLRGGTKRGGSPSNDSQVQHNVHDDQCAVGVAPRNFYFNKDREITDPNVKLDENESKINISFWLNSKYRDEAYSLNESSSNNASSNTDTPTNSRHANTSSSITSRNNFQHFRFNQIPSQPPTSASSFTSTNNNNPQRNNINRGEDPFATSSRPSTGFFYGDLPNRNNRNSPFHTNEQYIPPPPPKYINSKLDGLRSRLLLGPNSASSSTKLDDDLGTAAAVLSNMRSSPYRTHDKPISNVNDMNNTNALGVPASRPHSSSFPSKGVLRPILLRIHNSEQQPIFESNNSTAVFDEDQDQNQDLSPYHLNLNSKKVLDPTFESRTRQVTWNKNGKRIDRRLSAPEQQQQLEVPPLKKSRRSVGNARVASQTNSDYNSLGESSTSSAPSSPSLKASSGLAYTADYPNATSPDFAKSKGKNVKPKAKSKAKQSSKKRPNNTTSKSKANNSQESNNATSSTSQGTRSRTGCWICRLRKKKCTEERPHCFNCERLKLDCHYDAFKPDFVSDPKKKQMKLEEIKKKTKEAKRRAMKKK

SEQ ID NO: 262 - protein, 385 aa, Saccharomyces cerevisiae
MSQETKMLPSLSSLLSGTEISSSPVSPSFTNPRTSFHLDDRGTIKLPPLNTSINRPRSVESALRHTVTSLHENSSAYGDDMLKHTQSDSALSSQLNSSQETVDESHENLLLTPLNSKKRDYSVSSKKNDILTPLSAAKSIIIPSASKEKRRAFAFITHSQETFPKKEPKIDNAPLARRKRRRTSSQELSILQAEFEKCPAPSKEKRIELAESCHMTEKAVQIWFQNKRQAVKRQRIATSKSTTIIQTVSPPSPPLDVHATPLASRVKADILRDGSSCSRSSSSSPLENTPPRPHHSLNRRSSTPSIKRSQALTFHLNPQKKTLTPVKTSPNSRVNKLINSIDHSPSKAKRPVSNPSGSPKRKRKFGFKIVDQQPLKDLDPNAFRG

SEQ ID NO: 263 - protein, 298 aa, Saccharomyces cerevisiae
MSGELANYKRLEKVGEGTYGVVYKALDLRPGQGQRVVALKKIRLESEDEGVPSTAIREISLLKELKDDNIVRLYDIVHSDAHKLYLVFEFLDLDLKRYMEGIPKDQPLGADIVKKFMMQLCKGIAYCHSHRILHRDLKPQNLLINKDGNLKLGDFGLARAFGVPLRAYTHEIVTLWYRAPEVLLGGKQYSTGVDTWSIGCIFAEMCNRKPIFSGDSEIDQIFKIFRVLGTPNEAIWPDIVYLPDFKPSFPQWRRKDLSQVVPSLDPRGIDLLDKLLAYDPINRISARRAAIHPYFQES

SEQ ID NO: 264 - protein, 245 aa, Saccharomyces cerevisiae
MALPLIKPKESEESHLALLSKIHVSKNWKLPPRLPHRAAQRRKRVHRLHEDYETEENDEELQKKKRQNRDAQRAYRERKNNKLQVLEETIESLSKVVKNYETKLNRLQNELQAKESENHALKQKLETLTLKQASVPAQDPILQNLIENFKPMKAIPIKYNTAIKRHQHSTELPSSVKCGFCNDNTTCVCKELETDHRKSDDGVATEQKDMSMPHAECNNKDNPNGLCSNCTNIDKSCIDIRSIIH

SEQ ID NO: 265 - protein, 383 aa, Saccharomyces cerevisiae
MQNPPLIRPDMYNQGSSSMATYNASEKNLNEHPSPQIAQPSTSQKLPYRINPTTTNGDTDISVNSNPIQPPLPNLMHLSGPSDYRSMHQSPIHPSYIIPPHSNERKQSASYNRPQNAHVSIQPSVVFPPKSYSISYAPYQINPPLPNGLPNQSISLNKEYIAEEQLSTLPSRNTSVTTAPPSFQNSADTAKNSADNNDNNDNVTKPVPDKDTQLISSSGKTLRNTRRAAQNRTAQKAFRQRKEKYIKNLEQKSKIFDDLLAENNNFKSLNDSLRNDNNILIAQHEAIRNAITMLRSEYDVLCNENNMLKNENSIIKNEHNMSRNENENLKLENKRFHAEYIRMIEDIENTKRKEQEQRDEIEQLKKKIRSLEEIVGRHSDSAT

SEQ ID NO: 266 - protein, 587 aa, Saccharomyces cerevisiae
MFTGQEYHSVDSNSNKQKDNNKRGIDDTSKILNNKIPHSVSDTSAAATTTSTMNNSALSRSLDPTDINYSTNMAGVVDQIHDYTTSNRNSLTPQYSIAAGNVNSHDRVVKPSANSNYQQAAYLRQQQQQDQRQQSPSMKTEEESQLYGDILMNSGVVQDMHQNLATHTNLSQLSSTRKSAPNDSTTAPTNASNIANTASVNKQMYFMNMNMNNNPHALNDPSILETLSPFFQPFGVDVAHLPMTNPPIFQSSLPGCDEPIRRRRISISNGQISQLGEDIETLENLHNTQPPPMPNFHNYNGLSQTRNVSNKPVFNQAVPVSSIPQYNAKKVINPTKDSALGDQSVIYSKSQQRNFVNAPSKNTPAESISDLEGMTTFAPTTGGENRGKSALRESHSNPSFTPKSQGSHLNLAANTQGNPIPGTTAWKRARLLERNRIAASKCRQRKKVAQLQLQKEFNEIKDENRILLKKLNYYEKLISKFKKFSKIHLREHEKLNKDSDNNVNGTNSSNKNESMTVDSLKIIEELLMIDSDVTEVDKDTGKIIAIKHEPYSQRFGSDTDDDDIDLKPVEGGKDPDNQSLPNSEKIK

SEQ ID NO: 267 - protein, 936 aa, Saccharomyces cerevisiae
MDGEMAIIESSNHVGTSSPTTETQFTIDSSALKDQETKESITNSPTSEVPIETKLPKSSDIVTEEKHPQNTTTDIENEVENPVTDDNGNLKLELPDNLDNADFSKLLEFDAKNDEALFNSNELLSHTMDPVNNIDLTHDHSREVSSKEDINIEPVNPDEDEREKTQDNTAAVKTEGIRNSEDTSIQKDEPTADAIYTDVHKLSVNKDTETLPTLVDEKNNMLHMRNNSITPIMFQQHELVGQPPQNTVTENNSTDAETTQRKLSEPIDASLPLPNEQPTIFAYARLDFQSFTFYVQTLHAIIGRRSENDFSHKVDVNLGPSKSISRRHAQIFYNFGTGRFELSIIGKNGAFVDDIFVEKGNTVPLRNKTKIQIGQIPFQFILPEQERNDDSKSPENADIAESEINTRNLKKNEPKSKKKITTGAKPKKAQTKPAVKKEKKPPKIPKKVYTLEEIPVEYRTKPTVSYSAMLTTCIRKYSTAKGMSLSEIYAGIRELFPYYKYCPDGWQSSVRHNLSLNKSFRKVSKEGKGWLWGLDEEYIAERERQKKKQSEIAVAKAQAAQLKLEQQQHKLQQVPQRGKKDIVSQRSNVNARKQNISQTLAANRAASNRKNTASDNQRTMKYLQEQLVILTRDRKGLSKQVIAAILTQALAMTINQVTQAAKNKGITGNPLTALMDKNPQHLNLILAAAVNAATAKVTKGEVKQLVNPETTAAAALAAKAQHSKPIRQPIVQTPHVPDRPPSQLSASASSHPNNYLHDKQPGSFDPSSLSRFFQPRQNARATSSVAATSVPAAASQNVDAQPKPKPAQDNDLESESGTSSSSSSSSESGSESDSGSDDGSASGSGDNSSTSSESESESDSGSEVDEKNNKNEKIDSESIKNNESKDDIPSKDENSSNDNREISKTDEEGHDSKRRKVSEDINEGITEVNVSLEEKL

SEQ ID NO: 268 - protein, 281 aa, Saccharomyces cerevisiae [sequence omitted]

SEQ ID NO: 269 - protein, 886 aa, Saccharomyces cerevisiae
MEGRSDFVATSQSGSEMSHSETRNRTGMNARKRKFACVECRQQKSKCDAHERAPEPCTKCAKKNVPCILKRDFRRTYKRARNEAIEKRFKELTRTLTNLTSDEILKKIEEEQEIVLDNSNFTKEKVKQLRKSAFETTEIEPRSYKTLRGEPISYSTNRRHTDSSPLTLLSSSTNFDPVHSTNVMTDDQLKCLPKSLGDVYLSSSDIAELFQEFATKYHQFLPVVDLSKGAERIYHLSPCLFWVILLIGLRRKFGATDLMTRLSVLVKSVLSEITISPIIRYTPSDKDEPVLNVASVYSVQAFLLYTFWPPLTSSLSADTSWNTIGTAMFQALRVGLNCAGFSKEYASANSELVNEQIRTWICCNVVSQTVASSFGFPAYVSFDYLVISSIRVPNSKSQVDIPNELRQMAQIARFENQIVNTMNSTPASVTGMVSQEEKQPLLHVLNQQLSQLEISLEENNLDDIRKFLLLVAKVHLLTYYFTDVTSQSAGKSNGNIYEGSYSIMELDTSFETKRGLVKVYNAAVNFLIHANSMWEHDPTIIKYFPGLFVLNIWQSACIISKLIHSSLHSMLDVNSGKKAYNNAISLTFNASVLKYDMAYRSSGIMRSIWSLFANMYDAWKNDQKEGGGRLNNDFNLGITIKSRMSVNVFFDCLYILKEKCGMAKLERETKVSTAYNVDEEEEEDEDEEGEEEEEEEELSSKVPENMDSQQLRTRKFTNVRHPEKKARKIIETIPLDPNPINAGSTSSGSSLTTPNSQVANTISYRGILNKMSPREQLNHANLDSSVSTDIKDTEAVNEPLPIGRNAEHPANQPPLSITQMQENTLPATQANSSLLETYPIVQSNPVTTTIKESPNSIMAGWDNWESDMVWRDVDILMNEFAFNPKV

SEQ ID NO: 270 - protein, 177 aa, Saccharomyces cerevisiae
MKLAQDMNVDEIFLKQAAEAIAVISSSPTHTDPIIRELLHRIRQSSPLSAVIPAPENVLKAGEPENMARGLIRIPETQTKRTGGNNHSKEGAQLYSCAKCQLKFSRSSDLRRHEKVHSLVLPHICSNCGKGFARKDALKRHSNTLTCQRNRKKLSEGSDVDVDELIKDAIKNGTGLL

SEQ ID NO: 271 - protein, 410 aa, Saccharomyces cerevisiae
MSTADQEQPKVVEATPEDGTASSQKSTINAENENTKQNQSMEPQETSKGTSNDTKDPDNGEKNEEAAIDENSNVEAAERKRKHISTDFSDDDLEKEEHNDQSLQPTVENRASKDRDSSATPSSRQELEEKLDRILKKPKVRRTRRDEDDLEQYLDEKILRLKDEMNIAAQLDIDTLNKRIETGDTSLIAMQKVKLLPKVVSVLSKANLADTILDNNLLQSVRIWLEPLPDGSLPSFEIQKSLFAALNDLPVKTEHLKESGLGRVVIFYTKSKRVEAQLARLAEKLIAEWTRPIIGASDNYRDKRIMQLEFDSEKLRKKSVMDSAKNRKKKSKSGEDPTSRGSSVQTLYEQAAARRNRAAAPAQTTTDYKYAPVSNLSAVPTNARAVGVGSTLNNSEMYKRLTSRLNKKHK

SEQ ID NO: 272 - protein, 1451 aa, Saccharomyces cerevisiae
MEETGDSKLVPRDEEEIVNDNDETKAPSEEEEGEDVFDSSEEDEDIDEDEDEARKVQEGFIVNDDDENEDPGTSISKKRRKHKRREREEDDRLSEDDLDLLMENAGVERTKASSSSGKFKRLKRVGDEGNAAESESDNVAASRQDSTSKLEDFFSEDEEEEESGLRNGRNNEYGRDEEDHENRNRTADKGGILDELDDFIEDDEFSDEDDETRQRRIQEKKLLREQSIKQPTQITGLSSDKIDEMYDIFGDGHDYDWALEIENEELENGNDNNEAEEEEIDEETGAIKSTKKKISLQDIYDLEDLKKNLMTEGDMKIRKTDIPERYQELRAGITDYGNMSSEDQELERNWIAEKISVDKNFDANYDLTEFKEAIGNAIKFITKENLEVPFIYAYRRNYISSREKDGFLLTEDDLWDIVSLDIEFHSLVNKKDYVQRFYAELHIDDPIVTEYFKNQNTASIAELNSLQDIYDYLEFKYANEINEMFINHTGKTGKKHLKNSSYEKFKASPLYQAVSDIGISAEDVGENISSQHQIHPPVDHPSSKPVEVIESILNANSGDLQVFTSNTKLAIDTVQKYYSLELSKNTKIREKVRSDFSKYYLADVVLTAKGKKEIQKGSLYEDIKYAINRTPMHFRRDPDVFLKMVEAESLNLLSVKLHMSSQAQYIEHLFQIALETTNTSDIAIEWNNFRKLAFNQAMDKIFQDISQEVKDNLTKNCQKLVAKTVRHKFMTKLDQAPFIPNVRDPKIPKILSLTCGQGRFGADAIIAVYVNRKGDFIRDYKIVDNPFDKTNPEKFEDTLDNIIQSCQPNAIGINGPNPKTQKFYKRLQEVLHKKQIVDSRGHTIPIIYVEDEVAIRYQNSERAAQEFPNKPPLVKYCIALARYMHSPLLEYANLTSEEVRSLSIHPHQNLLSSEQLSWALETAFVDIVNLVSVEVNKATDNNYYASALKYISGFGKRKAIDFLQSLQRLNEPLLARQQLITHNILHKTIFMNSAGFLYISWNEKRQKYEDLEHDQLDSTRIHPEDYHLATKVAADALEYDPDTIAEKEEQGTMSEFIELLREDPDRRAKLESLNLESYAEELEKNTGLRKLNNLNTIVLELLDGFEELRNDFHPLQGDEIFQSLTGESEKTFFKGSIIPVRVERFWHNDIICTTNSEVECVVNAQRHAGAQLRRPANEIYEIGKTYPAKVIYIDYANITAEVSLLDHDVKQQYVPISYSKDPSIWDLKQELEDAEEERKLMMAEARAKRTHRVINHPYYFPFNGRQAEDYLRSKERGEFVIRQSSRGDDHLVITWKLDKDLFQHIDIQELEKENPLALGKVLIVDNQKYNDLDQIIVEYLQNKVRLLNEMTSSEKFKSGTKKDVVKFIEDYSRVNPNKSVYYFSLNHDNPGWFYLMFKINANSKLYTWNVKLTNTGYFLVNYNYPSVIQLCNGFKTLLKSNSSKNRMNNYR

SEQ ID NO: 273 - protein, 435 aa, Saccharomyces cerevisiae
MVVNTIYIARHGYRSNWLPEGPYPDPLTGIDSDVPLAEHGVQQAKELAHYLLSLDNQPEAAFASPFYRCLETVQPIAKLLEIPVYLERGIGEWYRPDRKPVIPVPAGYEILSKFFPGVISQEWDSTLTPNEKGETEQEMYMRFKKFWPLFIERVEKEYPNVECILLVTHAASKIALGMSLLGYDNPRMSLNENGDKIRSGSCSLDKYEILKKSYDTIDETDDQTSFTYIPFSDRKWVLTMNGNTEFLSSGEEMNWNFDCVAEAGSDADIKKRQMTKKTSSPIPEADDQTEVETVYISVDIPSGNYKERTEIAKSAILQYSGLETDAPLFRIGNRLYEGSWERLVGTELAFPNAAHVHKKTAGLLSPTEENETTNAGQSKGSSTANDPNIQIQEEDVGLPDSTNTSRDHTGDKEEVQSEKIYRIKERIVLSNVRPM

SEQ ID NO: 274 - protein, 713 aa, Saccharomyces cerevisiae
MTASVSNTQNKLNELLDAIRQEFLQVSQEANTYRLQNQKDYDFKMNQQLAEMQQIRNTVYELELTHRKMKDAYEEEIKHLKLGLEQRDHQIASLTVQQQRQQQQQQQVQQHLQQQQQQLAAASASVPVAQQPPATTSATATPAANTTTGSPSAFPVQASRPNLVGSQLPTTTLPVVSSNAQQQLPQQQLQQQQLQQQQPPPQVSVAPLSNTAINGSPTSKETTTLPSVKAPESTLKETEPENNNTSKINDTGSATTATTTTATETEIKPKEEDATPASLHQDHYLVPYNQRANHSKPIPPFLLDLDSQSVPDALKKQTNDYYILYNPALPREIDVELHKSLDHTSVVCCVKFSNDGEYLATGCNKTTQVYRVSDGSLVARLSDDSAANNHRNSITENNTTTSTDNNTMTTTTTTTITTTAMTSAAELAKDVENLNTSSSPSSDLYIRSVCFSPDGKFLATGAEDRLIRIWDIENRKIVMILQGHEQDIYSLDYFPSGDKLVSGSGDRTVRIWDLRTGQCSLTLSIEDGVTTVAVSPGDGKYIAAGSLDRAVRVWDSETGFLVERLDSENESGTGHKDSVYSVVFTRDGQSVVSGSLDRSVKLWNLQNANNKSDSKTPNSGTCEVTYIGHKDFVLSVATTQNDEYILSGSKDRGVLFWDKKSGNPLLMLQGHRNSVISVAVANGSPLGPEYNVFATGSGDCKARIWKYKKIAPN

SEQ ID NO: 275 - protein, 437 aa, Saccharomyces cerevisiae
MPKKVWKSSTPSTYEHISSLRPKFVSRVDNVLHQRKSLTFSNVVVPDKKNNTLTSSVIYSQGSDIYEIDFAVPLQEAASEPVKDYGDAFEGIENTSLSPKFVYQGETVSKMAYLDKTGETTLLSMSKNGSLAWFKEGIKVPIHIVQELMGPATSYASIHSLTRPGDLPEKDFSLAISDFGISNDTETIVKSQSNGDEEDSILKIIDNAGKPGEILRTVHVPGTTVTHTVRFFDNHIFASCSDDNILRFWDTRTSDKPIWVLGEPKNGKLTSFDCSQVSNNLFVTGFSTGIIKLWDARAAEAATTDLTYRQNGEDPIQNEIANFYHAGGDSVVDVQFSATSSSEFFTVGGTGNIYHWNTDYSLSKYNPDDTIAPPQDATEESQTKSLRFLHKGGSRRSPKQIGRRNTAAWHPVIENLVGTVDDDSLVSIYKPYTEESE

SEQ ID NO: 276 - protein, 650 aa, Saccharomyces cerevisiae
MSVSTAKRSLDVVSPGSLAEFEGSKSRHDEIENEHRRTGTRDGEDSEQPKKKGSKTSKKQDLDPETKQKRTAQNRAAQRAFRERKERKMKELEKKVQSLESIQQQNEVEATFLRDQLITLVNELKKYRPETRNDSKVLEYLARRDPNLHFSKNNVNHSNSEPIDTPNDDIQENVKQKMNFTFQYPLDNDNDNDNSKNVGKQLPSPNDPSHSAPMPINQTQKKLSDATDSSSATLDSLSNSNDVLNNTPNSSTSMDWLDNVIYTNRFVSGDDGSNSKTKNLDSNMFSNDFNFENQFDEQVSEFCSKMNQVCGTRQCPIPKKPISALDKEVFASSSILSSNSPALTNTWESHSNITDNTPANVIATDATKYENSFSGFGRLGFDMSANHYVVNDNSTGSTDSTGSTGNKNKKNNNNSDDVLPFISESPFDMNQVTNFFSPGSTGIGNNAASNTNPSLLQSSKEDIPFINANLAFPDDNSTNIQLQPFSESQSQNKFDYDMFFRDSSKEGNNLFGEFLEDDDDDKKAANMSDDESSLIKNQLINEEPELPKQYLQSVPGNESEISQKNGSSLQNADKINNGNDNDNDNDVVPSKEGSLLRCSEIWDRITTHPKYSDIDVDGLCSELMAKAKCSERGVVINAEDVQLALNKHMN

SEQ ID NO: 277 - protein, 383 aa, Saccharomyces cerevisiae; identical to SEQ ID NO: 265

SEQ ID NO: 278 - protein, 409 aa, Saccharomyces cerevisiae
MGNILRKGQQIYLAGDMKKQMLLNKDGTPKRKVGRPGRKRIDSEAKSRRTAQNRAAQRAFRDRKEAKMKSLQERVELLEQKDAQNKTTTDFLLCSLKSLLSEITKYRAKNSDDERILAFLDDLQEQQKRENEKGTSTAVSKAAKELPSPNSDENMTVNTSIEVQPHTQENEKVMWNIGSWNAPSLTNSWDSPPGNRTGAVTIGDESINGSEMPDFSLDLVSNDRQTGLEALDYDIHNYFPQHSERLTAEKIDTSACQCEIDQKYLPYETEDDTLFPSVLPLAVGSQCNNICNRKCIGTKPCSNKEIKCDLITSHLLNQKSLASVLPVAASHTKTIRTQSEAIEHISSAISNGKASCYHILEEISSLPKYSSLDIDDLCSELIIKAKCTDDCKIVVKARDLQSALVRQLL

SEQ ID NO: 279 - protein, 647 aa, Saccharomyces cerevisiae
MKYPAFSINSDTVHLTDNPLDDYQRLYLVSVLDRDSPPASFSAGLNIRKVNYKSSIAAQFTHPNFIISARDAGNGEEAAAQNVLNCFEYQFPNLQTIQSLVHEQTLLSQLASSATPHSALHLHDKNILMGKIILPSRSNKTPVSASPTKQEKKALSTASRENATSSLTKNQQFKLTKMDHNLINDKLINPNNCVIWSHDSGYVFMTGIWRLYQDVMKGLINLPRGDSVSTSQQQFFCKAEFEKILSFCFYNHSSFTSEESSSVLLSSSTSSPPKRRTSTGSTFLDANASSSSTSSTQANNYIDFHWNNIKPELRDLICQSYKDFLINELGPDQIDLPNLNPANFTKRIRGGYIKIQGTWLPMEISRLLCLRFCFPIRYFLVPIFGPDFPKDCESWYLAHQNVTFASSTTGAGAATAATAAANTSTNFTSTAVARPRQKPRPRPRQRSTSMSHSKAQKLVIEDALPSFDSFVENLGLSSNDKNFIKKNSKRQKSSTYTSQTSSPIGPRDPTVQILSNLASFYNTHGHRYSYPGNIYIPQQRYSLPPPNQLSSPQRQLNYTYDHIHPVPSQYQSPRHYNVPSSPIAPAPPTFPQPYGDDHYHFLKYASEVYKQQNQRPAHNTNTNMDTSFSPRANNSLNNFKFKTNSKQ

SEQ ID NO: 280 - protein, 730 aa, Saccharomyces cerevisiae
MQDDPENSKLYDLLNSHLDVHGRSNEEPRQTGDSRSQSSGNTGENEEDIAFASGLNGGTFDSMLEALPDDLYFTDFVSPFTAAATTSVTTKTVKDTTPATNHMDDDIAMFDSLATTQPIDIAASNQQNGEIAQLWDFNVDQFNMTPSNSSGSATISAPNSFTSDIPQYNHGSLGNSVSKSSLFPYNSSTSNSNINQPSINNNSNTNAQSHHSFNIYKLQNNNSSSSAMNITNNNNSNNSNIQHPFLKKSDSIGLSSSNTTNSVRKNSLIKPMSSTSLANFKRAASVSSSISNMEPSGQNKKPLIQCFNCKTFKTPLWRRSPEGNTLCNACGLFQKLHGTMRPLSLKSDVIKKRISKKRAKQTDPNIAQNTPSAPATASTSVTTTNAKPIRSRKKSLQQNSLSRVIPEEIIRDNIGNTNNILNVNRGGYNFNSVPSPVLMNSQSYNSSNANFNGASNANLNSNNLMRHNSNTVTPNFRRSSRRSSTSSNTSSSSKSSSRSVVPILPKPSPNSANSQQFNMNMNLMNTTNNVSAGNSVASSPRIISSANFNSNSPLQQNLLSNSFQRQGMNIPRRKMSRNASYSSSFMAASLQQLHEQQQVDVNSNTNTNSNRQNWNSSNSVSTNSRSSNFVSQKPNFDIFNTPVDSPSVSRPSSRKSHTSLLSQQLQNSESNSFISNHKFNNRLSSDSTSPIKYEADVSAGGKISEDNSTKGSSKESSAIADELDWLKFGI

SEQ ID NO: 281 - protein, 1082 aa, Saccharomyces cerevisiae
MTTTIGSPQMLANEERLSNEMHALKNRSEQNGQEQQGPVKNTQLHGPSATDPETTATQKESLEMVPKDTSAATMTSAPPPALPHVEINQVSLALVIRNLTVFTMKELAQYMKTNVHTQANEPNSAKKIRFLQLIIFLRTQFLKLYVLVKWTRTIKQNNFHVLIDLLNWFRTTNMNVNNCIWALKSSLNSMTNAKLPNVDLVTALEVLSLGRPNLPTHNFKLSGVSNSMDMVDGMAKVPIGLILQRLKDLNLTVSIKIALMNIPKPLNSYHIKNGRIYFTVPNEFEIQLSTVNRQSPLFFVDLKLLFNTEAEQTVSAVTEATSTNGDSENNEENSSSNGNNLPLNKPRLEKLINEILLKSNDPLLSLYNFLHKYVLTLQLYMVHREFLKLANGGKFSKSNLIHNYDSKKSTITVRYWLNGKMDSKGKITIGIQRTTESLILKWDNQSASRAKNMPVIYNNIVSNIEGILDEIMFNHARIIRSELLARDIFQEDEENSDVLLFQLPTTCVSMAPIQLKIDLLSGQFYFRNPTPLLSNYASKINRAEGPEELARILQQLKLDKIIHVLTTMFENTGWSCSRIIKIDKPIRTQVNTGGESVVKKEDNKYAIAGNSTTNSDVSLLLQRDLFIRLPHWPLNWYLILSIISSKTSCVVEKRIGKIVSQRGKWNLKYLDNSNVMTVKLESITYQKIMILQRTILNRIINHMLIDSLNQLEIRNKICSSEMINEQKLPQYIIQGSNTNDNISIITLELESFLEGSKALNSILESSMFLRIDYSNSQIRLYAKFKRNTMMIQCQIDKLYIHFVQEEPLAFYLEESFTNLGIIVQYLTKFRQKLMQLVVLTDVVERLHKNFESENFKIIALQPNEISFKYLSNNDEDDKDCTIKISTNDDSIKNLTVQLSPSNPQHIIQPFLDNSKMDYHFIFSYLQFTSSLFKALKVILNERGGKFHESGSQYSTMVNIGLHNLNEYQIVYYNPQAGTKITICIELKTVLHNGRDKIQFHIHFADVAHITTKSPAYPMMHQVRNQVFMLDTKRLGTPESVKPANASHAIRLGNGVACDPSEIEPILMEIHNILKVDSNSSSS

SEQ ID NO: 282 - protein, 597 aa, Saccharomyces cerevisiae; identical to SEQ ID NO: 240

SEQ ID NO: 283 - protein, 1341 aa, Saccharomyces cerevisiae
MSLSPHVENASIPKGSTPIPKNRNVSSIGKGEFLGSSSSNNSSFRMNHYSNSGQPSVLDSIRRPNLTPTFSYSNGVYMPESHRTSSFNDSYLPYDKNPYAKTTGSMSNKSNMKIKTKKNAINTNTRKSSGLIYTTKVDKELSSIDKVNDPNINGLVCAGKTHLGLYKFSPSDRSIKCVHDFITPNSNTSTRGTTSLLPKLSKRTRQNKFSTIADVKTGFNNYKNCIAVCNNSTAISIYDLNKSSSIDNPLITSLCEHTRSINSFDFNMVESNLIISGGQDSCVKIWDLRSNKSKSSNRSDISINTASDSIRDVKWMPGYNFASKNDQGSSTYGNLKSGYKFASIHDSGYLLKFDLRQPAQYEKKLNAHTGPGLCLNWHPNQEYIATGGRDGKCCLWFVGDNANAAENTVLNYGNSPSLHAPNTSLNNSGSLAFPKLTINTGYPVTKLKFKPAYSSNIYNSLLGISSMGDEAEVRIYSLARKYIPKHVLLSETPSLGLVWWDENLIFNIDKGTRINGWDINKEPTVLENLSKNTTTWRDLDGNGLLSVDQEIGSYEVVEPELQPTSSTTCKKHPGTIKNPKNGNPENQGIIGGIKKGFSHTGLTSFTPERPPTLKAGPTFSTKSLTLASGASSFNSSSASLTSLTPQTENREEIAIEPPCIITLDIPQIFNNIRLTKIAHSRKKNVISESSSMKNSPVEKFKYLARQLKFSYIREHNVSDSADTAYKNDIENIDVVKNATETHGDNTTTTNNNDDGDDDDDDDDDDKIIESHLLKKYNFPENNTWATLMNEKVNNKKSKRNSSSSREFDEKDVRSSISSISASRQSHDRARKIDKNVEAELQEKIQTLVDLISIATHNASVYLSIDDLTNFKIWILIRDSLLWDLKWMTSSQISSDNASNMDANESSDFEAGENLKTGKEFPEEDGAGTSGAESLVEERPQAFRANSDEPSDAEKKPVSKLKEQLKNTEIIPYAQPNEDSDEVLTKLKELQNQRLESRTKMGETVSDDVIIEEDEHEHQEEEQPHDSPTKSAQFHASPIAKSIPILQKREHRKSFIDTFMLHSPNGYNGDTDIGNEDDNISPRFTYNSVSPRSKVSSLQSYATTTSQLETFKKLSSHTAPIIGSPRHAPSRPDSIGREQLSSSLTKKLAKCKKIIADPPWDTKKLIKQLYNQATETGNVVLTVNILFLFQTIYQITEIDIAKDAIAHFLLLLHRYELFGIAADVLKYCPFEDIMGSEGDQSSIRLFCERCGELITNESSKEKLRAEAQQTGNKKIMDKFGYWYCDSCKKKNTSCVLCERPLKKLTMVILPCGHEGHFQCIQEWFLDENEQECPGGCPGVAFI

SEQ ID NO: 284 - protein, 510 aa, Saccharomyces cerevisiae
MHVFFPLLFRPSPVLFIACAYIYIDIYIHCTRCTVVNITMSTNRVPNLDPDLNLNKEIWDLYSSAQKILPDSNRILNLSWRLHNRTSFHRINRIMQHSNSIMDFSASPFASGVNAAGPGNNDLDDTDTDNQQFFLSDMNLNGSSVFENVFDDDDDDDDVETHSIVHSDLLNDMDSASQRASHNASGFPNFLDTSCSSSFDDHFIFTNNLPFLNNNSINNNHSHNSSHNNNSPSIANNTNANTNTNTSASTNTNSPLLRRNPSPSIVKPGSRRNSSVRKKKPALKKIKSSTSVQSSATPPSNTSSNPDIKCSNCTTSTTPLWRKDPKGLPLCNACGLFLKLHGVTRPLSLKTDIIKKRQRSSTKINNNITPPPSSSLNPGAAGKKKNYTASVAASKRKNSLNIVAPLKSQDIPIPKIASPSIPQYLRSNTRHHLSSSVPIEAETFSSFRPDMNMTMNMNLHNASTSSFNNEAFWKPLDSAIDHHSGDTNPNSNMNTTPNGNLSLDWLNLNL

SEQ ID NO: 285 - protein, 306 aa, Saccharomyces cerevisiae
MNYNCEIQNRNSKNVDNQVSLPPIQVLFNSIEKRSMPELAFSNIEYSHGNLRSSTEEQNYPAPVLLPQHHSIAYPAINSGGTSTTATPTASTVETSKTSSSAMDTQSQYGSSKKSKSASDDAKPCYKSAPIYEIINKEKDAGAQYNRPFSDFVESKSRRKQNSGRRSNLPKETVQILNTWLLNHLNNPYPTQQEKRELLIKTGLTKIQLSNWFINVRRRKIFSDYYTLVNSIPNDNANNTPVERVQNVSAYHNTLSATNNTMYDATSTCSTDYELSKRFAHAPVTRRKKLIDRLEELKKLSNPDMN

SEQ ID NO: 286 - protein, 615 aa, Saccharomyces cerevisiae
MLSYFQGFVPIHTIFYSVFHPTEGSKIKYEFPPNNLKNHGINFNTFKNYIIPKPILCHKLITFKYGTYRIVCYPVTINSPIYARNFFSFNFVFVFPYDCETSPYEPAITRLGKMFKVLEEQNQLLSKSERDPVFFDLKVLENSTTTPSTAGPSSTPNPSSNTTPTHPTSEKDTKDMRSSRYSDLIKDLGLPQSAFSIQDLLMRIFQDLNNYSECLIPIDEGNAVDIKIFPLLRPPTTCVSLEDVPLSSVNLKKIIDVNWDPTMMSIVPYIDGLNSIAKISKLSNSDPGLVIECIRHLIYYKCVTLSDIFQFSNIYAPSSLIRNFLTDPLMASDCQSYVTFPEVSKISNLPLNKSLGSGDQDSPSFSVRRKSKSSSIPSNPDSRTTSFSSTSRVSQNSSLNSSFSSIYKDWRQSQTSCSSSNIHVINNRNRFLPTRSCLFDLYRSLSQGQTLKTWYESKYMILKENNIDIRRFITFGLEKRIIYRCYSFPVMINAGSREPKEMTPIITKDLVNNDKLLEKRNHNHLLSATGSRNTAQSGNLKPERPSKVSFEMQRVSSLATGKSTMPKLSDEEEGILEESIRNAETFDKICVLLSKPKLEVESYLNELGEFKVINS

SEQ ID NO: 287 - protein, 970 aa, Saccharomyces cerevisiae
MDPHQSPADNAASPTKSVKATTKNSSTNNNVNSNNSNNNSNHDILNFNDNYTTILQHLANDHPNILREKGGSQQQQHQQQQQQQQQQQQQQQQQSLDTLLHHYQSLLSKSDNAIAFDDNVSNSADHNGSNSNNNNNNNDISSPGNLMGSCNQCRLKKTKCNYFPDLGNCLECETSRTKCTFSIAPNYLKRTSSGANNNMPTSSNSKRMKNFEDYSNRLPSSMLYRHQQQQQQQQQQQRIQYPRSSFFVGPASVFDLNLTKHVRLDNVDQIQLSKTLSLRKVSPTAQFILQDDFDTTLHSKQEYEVDLVENLVHPHGHLLVEIFFKLIHPFLPILHERVFLEKYSRSYRELTAPLLASIYSLALQYWDFHPALLGFPKPDVTAQLNNIALETFYARVGRPKLSIIQTGLLILQCRSECHNNWVLCSSVVALAEELGLGVECNDWKLPKWEKDLRKRLAWAVWLMDKWCALNEGRQSHLILGRNWMIKLLNFDDFPLNSPTILNSLQNDQSGSSPSSSNDVKNHQIAFGNLPIFNINPTLEDFKNGTLMFQQMVSLSIILGEIMDTFYTQGSMTINKSIEQVLKLAKPLQLKLREWYHSLPKNLSMSYATPQKLNSNSTLTLAYFATEITLHRKIICALNPQTPKELVQVCRTAARTRLVAAIEFIRDLKNEHINAFWYNCSTGNLMLIGTFAALLYVTSATKEEAMIFRDYVRNYTWVLKIGSKYFDKLSNALNNMHLLFAQIPGLLTDEPVVVSPNSNINSVNPQRSGVQSQIPIQFNVGSPAMTEQGSPLNQWKNLPQEILQQLNSFPNGTTSTTTPVNPTSRQTQLESQGSPAINSANNNSNNTPLPFAPNKSSKKTSQSSPNVTPSHMSRHPPSNTSSPRVNSSTNVNSNTQMNASPLTSINETRQESGDAADEKTAGRERTANEESSTELKDDNPNSNQETSATGNQTIKMNDDKNVTINTRETPL

SEQ ID NO: 288 - protein, 255 aa, Saccharomyces cerevisiae
MDESVDPVELLLRLLIRHKPHLKPYAYRQDSWQRVLDEYNRQTGSRYRQSRTLKTKFRRLKDLFSADRAQFSPSQLKLMGALLDEAPEHPRPRTKFGNESSSSLSSSSFIKSHPGPDPFQQLSSAEHPNNHSSDDEHSGSQPLPLDSITIGIPPTLHTIPMILSKDNDVGKVIKSPKINKGTNRFSETVLPPQMAAEQSWSDSNMELEICLDYLHNELEVIKKRQEDFECKVLNKLNIIEALLSQMRPPSQGDKI

SEQ ID NO: 289 - protein, 1950 aa, Saccharomyces cerevisiae
MSVADDDLGSLQGHIRRTLRSIHNLPYFRYTRGPTERADMSRALKEFIYRYLYFVISNSGENLPTLFNAHPKQKLSNPELTVFPDSLEDAVDIDKITSQQTIPFYKIDESRIGDVHKHTGRNCGRKFKIGEPLYRCHECGCDDTCVLCIHCFNPKDHVNHHVCTDICTEFTSGICDCGDEEAWNSPLHCKAEEQENDISEDPATNADIKEEDVWNDSVNIALVELVLAEVFDYFIDVFNQNIEPLPTIQKDITIKLREMTQQGKMYERAQFLNDLKYENDYMFDGTTTAKTSPSNSPEASPSLAKIDPENYTVIIYNDEYHNYSQATTALRQGVPDNVHIDLLTSRIDGEGRAMLKCSQDLSSVLGGFFAVQTNGLSATLTSWSEYLHQETCKYIILWITHCLNIPNSSFQTTFRNMMGKTLCSEYLNATECRDMTPVVEKYFSNKFDKNDPYRYIDLSILADGNQIPLGHHKILPESSTHSLSPLINDVETPTSRTYSNTRLQHILYFDNRYWKRLRKDIQNVIIPTLASSNLYKPIFCQQVVEIFNHITRSVAYMDREPQLTAIRECVVQLFTCPTNAKNIFENQSFLDIVWSIIDIFKEFCKVEGGVLIWQRVQKSNLTKSYSISFKQGLYTVETLLSKVHDPNIPLRPKEIISLLTLCKLFNGAWKIKRKEGEHVLHEDQNFISYLEYTTSIYSIIQTAEKVSEKSKDSIDSKLFLNAIRIISSFLGNRSLTYKLIYDSHEVIKFSVSHERVAFMNPLQTMLSFLIEKVSLKDAYEALEDCSDFLKISDFSLRSVVLCSQIDVGFWVRNGMSVLHQASYYKNNPELGSYSRDIHLNQLAILWERDDIPRIIYNILDRWELLDWFTGEVDYQHTVYEDKISFIIQQFIAFIYQILTERQYFKTFSSLKDRRMDQIKNSIIYNLYMKPLSYSKLLRSVPDYLTEDTTEFDEALEEVSVFVEPKGLADNGVFKLKASLYAKVDPLKLLNLENEFESSATIIKSHLAKDKDEIAKVVLIPQVSIKQLDKDALNLGAFTRNTVFAKVVYKLLQVCLDMEDSTFLNELLHLVHGIFRDDELINGKDSIPEAYLSKPICNLLLSIANAKSDVFSESIVRKADYLLEKMIMKKPNELFESLIASFGNQYVNDYKDKKLRQGVNLQETEKERKRRLAKKHQARLLAKFNNQQTKFMKEHESEFDEQDNDVDMVGEKVYESEDFTCALCQDSSSTDFFVIPAYHDHSPIFRPGNIFNPNEFMPMWDGFYNDDEKQAYIDDDVLEALKENGSCGSRKVFVSCNHHIHHNCFKRYVQKKRFSSNAFICPLCQTFSNCTLPLCQTSKANTGLSLDMFLESELSLDTLSRLFKPFTEENYRTINSIFSLMISQCQGFDKAVRKRANFSHKDVSLILSVHWANTISMLEIASRLEKPYSISFFRSREQKYKTLKNILVCIMLFTFVIGKPSMEFEPYPQQPDTVWNQNQLFQYIVRSALFSPVSLRQTVTEALTTFSRQFLRDFLQGLSDAEQVTKLYAKASKIGDVLKVSEQMLFALRTISDVRMEGLDSESIIYDLAYTFLLKSLLPTIRRCLVFIKVLHELVKDSENETLVINGHEVEEELEFEDTAEFVNKALKMITEKESLVDLLTTQESIVSHPYLENIPYEYCGIIKLIDLSKYLNTYVTQSKEIKLREERSQHMKNADNRLDFKICLTCGVKVHLRADRHEMTKHLNKNCFKPFGAFLMPNSSEVCLHLTQPPSNIFISAPYLNSHGEVGRNAMRRGDLTTLNLKRYEHLNRLWINNEIPGYISRVMGDEFRVTILSNGFLFAFNREPRPRRIPPTDEDDEDMEEGEDGFFTEGNDEMDVDDETGQAANLFGVGAEGIAGGGVRDFFQFFENFRNTLQPQGNGDDDAPQNPPPILQFLGPQFDGATIIRNTNPRNLDEDDSDDNDDSDEREIW

SEQ ID NO: 290 - protein, 678 aa, Saccharomyces cerevisiae
MHSHRQKWGRQTDIARVLDDIEHDLYLPQRLSLDGATGTDESHVQYGIVKDCSVLTCGCCISESLFNDLCRETSNKQTACPICQRENVRLLSAIKPLRDLARQIDFFRSTTGQGESESDELPAIVKTSPSSSSLSLTPSRSSSTAGLEADNKTLSDPTVKEKSSLLELFHIVASKMHNANTEVGSDHPLTTGTTRDQEEHTTKENYSSSLLEPNYDDHANWKILDNASNTRTVPIDNNFSLMSTDVTIPSTANYQTNSAHDLDEEKEYFFANCFPMYRKKFQFNTHPKFLGTKSKLFINQSISPDCTKFALITEHKWEIYSINPKDNSPQLVSCGKSSGEYGPNFNQLTEQSSSSLSTTSQASKKKKKNWSQRFCKLSNDFLIISGSQNILNVHDIHQNGKLIYTYVSRFPIRCIDIDPRSQIIAYGITGKDRHTGAEQALVVIQQITRNKVTLEPEFPPPITITLPYRDPINTIQLSHDAKYLTCSTALESRFLIISLQKINEPRLIMKSVRSIDTSLESEGITDTKLFPGNPNLMCITSTAFNSSPLVINTKITQINGVRTVAQPSMLIRVDEIGCKIHKCEISPRNDAIAFLDRNGSVYIMCAPTMMDNNEKRRTILVETVANAYRAYESATLRFNPEGNKLYILDRKGTFFVEDFAYGLPQSREITKCKQIFHK

SEQ ID NO: 291 - protein, 413 aa, Pyrococcus furiosus
AELEGLDESAAQVMATYVWNLGYDGSGITIGIIDTGIDASHPDLQGKVIGWVDFVNGRSYPYDDHGHGTHVASIAAGTGAASNGKYKGMAPGAKLAGIKVLGADGSGSISTIIKGVEWAVDNKDKYGIKVINLSLGSSQSSDGTDALSQAVNAAWDAGLVVVVAAGNSGPNKYTIGSPAAASKVITVGAVDKYDVITSFSSRGPTADGRLKPEVVAPGNWIIAARASGTSMGQPINDYYTAAPGTSMATPHVAGIAALLLQAHPSWTPDKVKTALIETADIVKPDEIADIAYGAGRVNAYKAINYDNYAKLVFTGYVANKGSQTHQFVISGASFVTATLYWDNANSDLDLYLYDPNGNQVDYSYTAYYDFEKVGYYNPTDGTWTIKVVSYSGSANYQVDVVSDGSLSQPGSSP

SEQ ID NO: 292 - protein, 177 aa, Thermoascus aurantiacus
TRISSCSGSRQSALTTALRNAASLANAAADAAQSGSASKFSEYFKTTSSSTRQTVAARLRAVAREASSSSSGATTYYCDDPYGYCSSNVLAYTLPSYNIIANCDIFYTYLPALTSTCHAQDQATTALHEFTHAPGVYSPGTDDLAYGYQAAMGLSSSQAVMNADTYALYANAIYLGC

SEQ ID NO: 293 - protein, 325 aa, Palaeococcus ferrophilus
GKPKPSQPPQEVPWGIERVKAPSVWSTTDGSSNGVIQVAILDTGIDYDHPDLAANLAWGVSTLRGRVSTKPKDYRDQNGHGTHVAGTIAALNNDIGVVGVAPGVQIYAIRVLDASGRGSYSDIAIGIEQAILGPDGVADKDGDGIIAGDPDDDAAEVISMSLGGSADDSYLHDMIIQAYNAGIVIVAASGNEGASSPSYPAAYPEVIAVGASDINDNIASFSNRQPEVSAPGVDVLSTYPDDTYKTLSGTSMATPHVSGVVALIQAAHFNKYGTILPVGTFDDMSKNTVRGILHITADDLGSPGWDVDYGYGIVRADLAVQAALG

SEQ ID NO: 294 - protein, 424 aa, Thermococcus litoralis
MEFNKVFSLLLVFVVLGATAGIVGAVSAEKVRVIITIDKDFNENSVFALGGNVVARGKVFPIVIAELSPRAVERLKNAKGVVRVEYDAEVQVLKGKSPGAGKPKPSQPAQTIPWGIERIKAPDVWSITDGSSSGVIEVAILDTGIDYDHPDLAANLAWGVSVLRGKVSTKPKDYKDQNGHGTHVAGTVAALNNDIGVVGVAPAVEIYAVRVLDASGRGSYSDIILGIEQALLGPDGVLDSDGDGIIVGDPDDDAAEVISMSLGGLSDVQAFHDAIIEAYNYGVVIVAASGNEGASSPSYPAAYPEVIAVGATDVNDQVPWWSNRGVEVSAPGVDVLSTYPDDSYETLSGTSMATPHVSGVVALIQAAYYNKYGSVLPVGTFDDNTMSTVRGILHITADDLGSSGWDADYGYGIVRADLAVQAVN

SEQ ID NO: 295 - protein, 422 aa, Thermococcus thioreducens
MGRKDITIALVALIVLSLLGVPATAEKPELVRVIVHVDRGHFNTADVATIGGHVVYQFKLIDAVVVEVPSTAVGRLKKLPGVKMVEFDHKARILAGPPSWLGGGQPSQQIPWGISRVRAPDVWGITDGSGGVIEVAVLDTGVDYDHPDLAGNIAWCVSTLRGRVTTNPAQCKDQNGHGTHVIGTIAALNNDIGVVGVAPGVEIYSIRVLDASGSGSYSDIAIGIEQALLGPDGILDKDGDGIIVGDPDDDAAEVISMSLGGPTDDQYLHDMIITAYNYGVVIVAASGNEGASSPSYPAAYPEVIAVGASDVNDQIASWSNRQPEVSAPGVDILSTYPDDTYETLSGTSMATPHVSGVVALIQAAYYNKYGKVLPVGTFDDMGTNTVRGILHVTADDLGDAGWDIYYGYGIVRADLAVQAAIG

SEQ ID NO: 296 - DNA, 16 bp, Artificial Sequence
  Artificial DNA Primer
attcccagctcgcccc

SEQ ID NO: 297 - DNA, 16 bp, Artificial Sequence
  Artificial DNA Primer
gttttagagctagaaa

SEQ ID NO: 298 - DNA, 20 bp, Artificial Sequence
  Artificial DNA Primer
atgtagaaaaaggagaacaa

SEQ ID NO: 299 - DNA, 20 bp, Artificial Sequence
  Artificial DNA Primer
agaaagaaaaaggatctcaa

SEQ ID NO: 300 - DNA, 20 bp, Artificial Sequence
  Artificial DNA Primer
ggagaattgggcaagtatgt

SEQ ID NO: 301 - DNA, 20 bp, Artificial Sequence
  Artificial DNA Primer
gatgagaaggtatccacaaa

SEQ ID NO: 302 - DNA, 20 bp, Artificial Sequence
  Artificial DNA Primer
acactccgagcaaccatagc

SEQ ID NO: 303 - DNA, 20 bp, Artificial Sequence
  Artificial DNA Primer
tccgttgctgatgatgattt

SEQ ID NO: 304 - DNA, 20 bp, Artificial Sequence
  Artificial DNA Primer
gtcttctcctcttcgatgac

SEQ ID NO: 305 - DNA, 20 bp, Artificial Sequence
  Artificial DNA Primer
tggtgtcacttcgatttctt

SEQ ID NO: 306 - DNA, 90 bp, Artificial Sequence
  Artificial DNA Sequence
acaacaaaacaaggataatcaaatagtgtaaaaaaaaaattcaagaatagtggtgagatacactgacattattgttatcagagaagaata

SEQ ID NO: 307 - DNA, 90 bp, Artificial Sequence
  Artificial DNA Sequence
cagtctattccatttgactgaagaaaaaaaaatttattactgaagaatagtcgccacaaagaggatgcaaaccaatggtgcgaaacactg

SEQ ID NO: 308 - DNA, 90 bp, Artificial Sequence
  Artificial DNA Sequence
tacgacgttccattcgactgaaaaaaaaaatatttatcgctgaagggcagttgccatcacaggacgacggaaatcccatggtgagggact

SEQ ID NO: 309 - DNA, 90 bp, Artificial Sequence
  Artificial DNA Sequence
tgtggcagaaaataaccgcaacaattatataacgtcacagaacactcatgaaaacataataataaacctgcagaggttcatatcaagttt

SEQ ID NO: 310 - DNA, 90 bp, Artificial Sequence
  Artificial DNA Sequence
gtagggtttgttatacgcaatattgctgttgaattattagaaattctagaacttttcttagaacgctaccatttctttattttttttgca

SEQ ID NO: 311 - DNA, 90 bp, Artificial Sequence
  Artificial DNA Sequence
ttattttttttttcttttgaattagatcactaataaactcttatatgcgtttaattaacttactgtctttttttttttttttttaaccat

SEQ ID NO: 312 - DNA, 90 bp, Artificial Sequence
  Artificial DNA Sequence
tccctaatctttacaggtcacacaaattacatagaacattccaatattcaagccctctactatgttttatagttgacatatttgtatata

SEQ ID NO: 313 - DNA, 90 bp, Artificial Sequence
  Artificial DNA Sequence
gactaaccgttaaagattctaaatcggtactgtaaatactttgaaggtatataatattttactaataaagaatttacaaagtttacaaat

SEQ ID NO: 314 - DNA, 90 bp, Artificial Sequence
  Artificial DNA Sequence
tattcttctctgataacaataatgtcagtgtatctcaccactattcttgaattttttttttacactatttgattatccttgttttgttgt

SEQ ID NO: 315 - DNA, 90 bp, Artificial Sequence
  Artificial DNA Sequence
cagtgtttcgcaccattggtttgcatcctctttgtggcgactattcttcagtaataaatttttttttcttcagtcaaatggaatagactg

SEQ ID NO: 316 - DNA, 90 bp, Artificial Sequence
  Artificial DNA Sequence
agtccctcaccatgggatttccgtcgtcctgtgatggcaactgcccttcagcgataaatattttttttttcagtcgaatggaacgtcgta

SEQ ID NO: 317 - DNA, 90 bp, Artificial Sequence
  Artificial DNA Sequence
aaacttgatatgaacctctgcaggtttattattatgttttcatgagtgttctgtgacgttatataattgttgcggttattttctgccaca

SEQ ID NO: 318 - DNA, 90 bp, Artificial Sequence
  Artificial DNA Sequence
tgcaaaaaaaataaagaaatggtagcgttctaagaaaagttctagaatttctaataattcaacagcaatattgcgtataacaaaccctac

SEQ ID NO: 319 - DNA, 90 bp, Artificial Sequence
  Artificial DNA Sequence
atggttaaaaaaaaaaaaaaaaagacagtaagttaattaaacgcatataagagtttattagtgatctaattcaaaagaaaaaaaaaataa

SEQ ID NO: 320 - DNA, 90 bp, Artificial Sequence
  Artificial DNA Sequence
tatatacaaatatgtcaactataaaacatagtagagggcttgaatattggaatgttctatgtaatttgtgtgacctgtaaagattaggga

SEQ ID NO: 321 - DNA, 90 bp, Artificial Sequence
  Artificial DNA Sequence
atttgtaaactttgtaaattctttattagtaaaatattatataccttcaaagtatttacagtaccgatttagaatctttaacggttagtc

SEQ ID NO: 322 - DNA, 1755 bp, Zygosaccharomyces bailii
atgtccaagatcttccctgtcgcttcccatggtttgtccttgtccgacttgaagtccttgtccgagagagaggaccgtatcttggacaagaacgtatccgagcacgagaaggccgagtgtttgcaagtagtgagaggggagatcgtctccaacgagtccgacaagaagttgcacaccttgcctttgcaagcctacttccattacgcatccatccagagggagtacgagaaggctaaggactacgagggattgtacatcacccaaaacgagcaaatgtacaccgacggacagtgcaacttctccccagccaagttggagactcaaagattgttgagaatcgctaagtcctactccgtcttcttcttgatcactaccgacatcttgggaccagcaaacgcaccatacgctgtcgcccagatgggatacgtacccggagtcatcttgtacgtcttgttcggagtcgcagcatccttctgtggatggttgttgaaccactgctactgcaaggtcgactccaacaactaccctgtccgtaccttctccgacttggctgcaaggatggtagctccctggttcaggtaccccttcgccttgttgcagttcatccaaatgttgttggcctgtggctccttgttgttgggaactgcccaggcattgtcccaaatgttgatcgtaaacagaggaaaggacaacttctgcttcacagtcgacatcttggtctgggccttgttgtgtatgatcgttggacaaatctcctccttgggaaagttcgctcatatcgcaaacactgccgtctggatgaacatcgcaatctgtatcatcaccatggttggagtcgctgtcggtggaccatactacggaatcttccaacaatacggaaagggtcccccttacttccaattgggaaccttcaacccgttgccaatcacaaagtacgcaatcacccctggaaccgtctccgacaagatcggaggcatgaacaacatggtattcgcatggggaggagctaccatcttctgcgaggtcatggctgagatgaagagacctatggacttctggaagggaatgttgtgtggacaatccttgatcttggtaatctacttgttgtacgccttgttcgtctactcctacaacggtcagttcacttacgtcacagcaaaccaaggaatcggctccatccccttgcaaaacgctacaaacgtgttgaccatcatcaccggattgatcgcaatgttgttgtacggaaacatcggaatcaaggtagtataccagggcttcttggtcccagacttcagattcccttccttgacctccaggaagggtaccatcacttggggtttgttcgtaatcgtctactgggctatctgttacatcatcggaacagcaatcccatccgtctccaccttgttgtccatcatcggttccttctgtgtattgaacttctcctacaccttccctttcttgttcgctttgtgcttgttgtgcagagtcgacgcaggattggtcgaccaattcgacccaagaaccttcatcgtaaccaagggagactcctacttccatggtttgtccagatggaagagggctttcggacatggaggtccctacagatgtttgttgaagttggctttcttcatcttgttcttggcagccttggctacctgtggattgtgtacatactccgctatcaccggtgccatcgctgcttaccaaacaaacaccgctcaaccgttcacctgttcctccccagtaggataa

SEQ ID NO: 323 - DNA, 1752 bp, Zygosaccharomyces kombuchaensis
atgtccaagttggtgcctatcgcttcccattccttgtccttgcactccccaagatcttacgagaaggacgaggcagacgtcgttttgcaagcatccttggaccacgagaagggcgagtacgttgacgtaatgggtcgtgagatcatctccgacgaggacgacaagaagttgcacactttgcctttgcaagcctacttgcaatacgcagacatgcagagggagttcgagagatccaaggacttcgagggattgtacatcgctcaaaaggagcaaatgtacacagacccacagtccaacatctctccagagaagttggagtcccaaagaatcgtgagagttgctaaggcatactccgttttcttcttgatcacaacagacatcttgggtccatccaacgcaccatacgctatcgcccagatgggttacgtacccggtgtcatcttgtacgttgtattcggtttggcagcagcattctgtggatggttgttgaactactgctactgcaaggttgactccaacaactaccctatccgtactttctccgacttggctgcaagggttgtcgctccctggttcaggtaccccttcgccttgttgcagttcatccaaatgatcttgaactgtgggttgatcttgttgtccactgcccaggcagtatcccaaatgttgatcgtaaacagaggaaaggacaacttctgcttcacggttgacatcttggtttgggccttgttgtgtatgttggtgggtcaaatcagatccttgggtaagttcgctcatatcgcaaacagtgccgtttggatgaacatcgcaatctgtatcgttacaatggtgggtgtcgctgttggcggtccatactacgagatcttcgaccaatacggtatgactgccccttacttcaagaccggaacattcgacccgttgccaatcgcccagtacgcaatcactcctggaactatctccgacaagattggtgggatgaacaacatggtattcgcatggggtggtgctacaatcttctgcgaggttatggctgagatgaagagacctatggacttctggaagggtatgttgtgtgctcaatccttgatcttggtagtctacttgttcttcgggttgttcgtttactcttacaacggccagttctcctacgttaccgcaaaccaaggtatcgggtccgtaggcttgcaaaacgctggcaacgtgttgtccatcatctccggtatcatcgcaatgatcttgtacggaaacgttggtatcaaggtagtataccaggggttcttgatgccagacttcaagttcccttccttgacttccaggaagggcacaatcgcatggggtgttttcgtagttgtctactgggctgttgcttacatcttgggtaccgcaatcccatccatctccgctttggtctccatcgtaggcgctttctgtatcttgaacttctcctacacattccctttcttgttcggtttctgcttgatgtgcagagaggacgcagcttccgcagacaggttcgacttcaagactttgaccgtggagaaggcagacacatacatgcattcctggagtagatggagaagggctttgttgtacggtggcatgaagagaacattcatcaagatctcctacttcttcttgttcttggcatctttggctacttgtggattgtgttcatactccgctgttactggtgccatcgctgcttaccaaacgacttccgctgcaccgttcacttgtacctccccagtctaa

SEQ ID NO: 324 - DNA, 1746 bp, Lachancea fermentati
atgtccaagttggtgcctatcatctccccatccttgtccttgagggcattggacgagacagacaaggagaaggtctaccaatccagtttggaccatgagaagggcgagactttcgacgtttccggaagggagatcatctcctccacaaacgagaagaaggcacacttgttgcccttgcaggcatacactcactacgcttccatccaacgtgagtacgagaaggcaaacgacttggacactttgtacgcagttcaaagggagcaaatgtacaccgaccctcatagtaacgtgtcccattccaagttggactcccagaggatgttgagaatggccaaggcttactccgtcttcttcttgatcaccacagacatcttgggtccgtccaacgctccatacgcagttgcacaaatgggctgggttccaggtgtaatcttgtacgtcttgttcggtgtagccgctgctttcggaggatggttgttgaactactgtttctgcaaggttgactccaacaactacccaatccgtacattcagtgacttggcagcaagagtcgtcgcaccatggttccgttaccctttcgcattgttgcagttcatccagatgatcttgaactgtggattgttgttgttgtccacagctcaaagcgtgtcccagatgttggtcgtgaacagaggaggagaccatttctgtttcactgtagacatcttggtttgggggttgttgtgcatgatcatcggacaaatctcctccttgggaaagttcgcacatatcgcaaactccgcagtatggatgaacatcgcaacatgcatcatcactatggttggtgtagccgttggtggtccttactacggtatcttcgagcagtacggacaagctccaccttacttcgagaccggaacattcaacccattgcccatcaagcaatacgccatcacgcctggaactatctccgacagaatctccggtatgaacaacatggtgttcgcttggggaggtgctactatcttctgtgaggttatggctgagatgagaagacctatggacttctggaagggtatgttgtgtgctcaatccttgatcttggttgtttacttgttctacggattgttcgtgtacgcatacaacggccaattctcttacgtgaccgcaaaccaggcaatcggatccgttgggttgcagaacgcaggaaacgttttgactatcatctccggtatcatcgctatggttttgtacggcaacatcggaatcaaggttatctaccagggattcttggtgacagacttcaagttcccttccttgacatcccgtaagggcaccttcgcctggggtggattcgtggttgtctactgggcagtcgcatacatcttgggaactgcaatcccctccatctccgctttggttggtatcgtcggagctttctgcatcttgaacttctcctacactttcccattcttgttcgggttgtgtttgatgtgcagacaagacgctgctgtcgcagaccacttcgactccaagtctatgtccgttgagaaggccgactcctacttgagaaactggtccaggtggaagagagccttcggatacggaggtacttacaggaccttgatcaagggttccttgttcttgttgttcttggcatccttggcaacgtgtggtttgtgttcctactccgccatctccggtgctatcgcagtgtaccaaacaaacccagcccaaccattcacatgcacttccccagtaggataa

SEQ ID NO: 325 - DNA, 1752 bp, Zygotorulaspora florentina
atgtccaagttgatccctatcgcttccccatccttgtccttgtctacctccaaggcctactacgagatgaacaaggagaaggcttaccaaggcatcgacgaccacgagaagggcgagtacgttgacgtaagtggtcgtgagatcgtttccaacgagaacgacaagaaggccaggcatttgcctttgcaagcctacttccattacgcagacatccagagggagtacgagaagttgaacgacggtgacggattgtacgcagctcaaagagagcaaatgtacacagacccaaactccaacatctctccagagaagttggactcccaaagaatgttgagaatcgctaaggcatactccgttttcttcttgatcacaacagacatcttgggtccatccaacgcaccatacgctgttgcccagatgggttgggtacccggtgtcatcttgtacgttttgttcggtgttgcagcagcattcggaggatggttgttgaactactgcttctgcaaggttgactccaacaactaccctatccgtactttctccgacttggcttccagggttgtcgctccctggttcaggtaccccttcgccttgttgcagttcatccaaatgatcttgaactgtgggttgttgttgttgtccactgcccagtccgtatcccaaatgttgatcgtaaacagaggaaaggacgacttctgcttcacggttgacatcttggtttggggcttgttgtgtatgatcatcggtcaaatctcctccttgggtaagttcgctcatatcgcaaacagtgccgtttggatgaacatcgcaacttgtatcatcacaatggtgggtgtcgctgttggcggtccatactacggtatcttcgagcaatacggtcaaggtgccccttacttcaagaccggaacattcgacccgttgccaatccagcagtacgcaatcactcctggaactatctccgacaagatctccgggatgaacaacatggtattcgcatggggtggtgctacaatcttctgcgaggttatggctgagatgaagagacctatggacttctggaagggtatgttgtgtgctcaatccttgatcttggtagtctacttgttctacgggttgttcgtttacgcctacaacggccagttctcctacgttaccgcaaacatggctatcgggtccatcgccttgcaaaacgctggcaacgtgttgactatcatctccggtatcatcgcaatggtgttgtacggaaacatcggtatcaaggtaatctaccaggggttcttggtctccgacttcaacttcccttccttgacttccaggaagggcacattcgcatggggtgctttcgtattggtctactgggctgttgcttacatcttgggtaccgcaatcccatccatctccgctttggtcggaatcgtaggcgctttctgtatcttgaacttctcctacacattccctttcttgttcggtttctgcttgttgtgcagacaagacgcagctttgatcgacaacttcgacccaacttccttgaccgtggagaaggcagactcctacttgagagactggagtagatggaagagggctttgggtcatggtggcacctacagaacattgatcaaggtatccttgttcttgttgttcttggcatctttggctacttgtggattgtgttcatactccgctatctctggtgccatcgctgtttaccaaacgaacccagctcaaccgttcacttgtacctccccagtctaa

SEQ ID NO: 326 - DNA, 1752 bp, Zygosaccharomyces rouxii
atgtccggtttggtgcctatcgcttcctacggcttgtccccgaacgcatccagagccttcgacgagatggagaaggagaaggctcgtttgtctcctccagaccacgagaagggcgactacgttgacgtcagcggtcgtgagatcgtttccgacgagaacggcaagggacgtcacttgccgttgcaagcttactcctactacgcagacatccaacgtgagtacgaggagtccaaggactacgacgggttgtacgcagtccaaagagagcagatgtacacagacacgcattcaaacttgacaccctccaagttggactcccaaagaatgatgcgtttggctaaggcttactccgttttcttcttgatcacgacagacatcttgggtccatccaacgctccaaacgcagtttcccagatgggttacgttccaggcgttatcttgtacgttttgttcggggttgctgcagcatttgggggatggttgttgaacaggtgcttctgtaaggttgactccaacaactacccgatcagaacgttctccgacttggcagctagaatcgttgcaccatggttcaggtaccctttcggtttgttgcagttcatccaaatgatcttgaactgcggtttgatcttgttgtccactgcccaggcagtctcccaaatgttggttgttaacagaggtaaggacgacttctgtttcaccgtggacatcttggtgtgggcattgttgtgtatgatcgtcgggcaaatcagatccttgtccagattcgctcatatcgcaaacttcgccgtgtggatgaacatcgccgtatgtatcatcactatggtcggggttgctgtaggaggcccatactacggtatcttcaaccaatacggtaagggtccaccctacttcgagccaggcacattcaaccccttgccgatcgctaagtacgccatcacaccaggatccactgcagacagaatcgcaggcatgaacaacatggttttcgcatggggtggtgctacaatcttctgtgaggttatggcagagatgaggcgtccaatggacttctggaaggggatgttgtgtgcacaatccttcatcttggtagtctacttgttcttcgggttgttcgtctactcctacaacggtcagttcagctacgtaactgccaaccagggaatcggtagtaaggccttgcagaatgccggtaacgttttgaccatcgtttccggtttgatcgctatgatcatgtacggtaacgtggctatcaaggtaatctaccaagggttcttggtggcagacttcggtttcccgtccttgacgtccaggatgggacgtatcacatggggtatcttcgtagtcgtttactgggcagttgcttacatcttgggaactgccatcccgtccatctccgctttggttcaaatcgttggtgccttctgtatcttgaacttctcctacactttccctttcttgttcggattctgtttgttgtgccgtcaagacgcagcaacagccgacgagttcgaccccaagactttgaacgtcgtgagagttgactcctacttgagaaactggtcccgttggaagagagcaatcacacatggtggtaccttgcgtatgttggtaaagatctccttgttcttgttgttcttggcctccttggcaacttgtggtttgtgttcctactccgctatcactggtgcaatccaggtttaccaaacaaacactgctcaacctttcacttgtagatcccctgtttcctaa

SEQ ID NO: 327 - DNA, 1755 bp, Zygosaccharomyces rouxii
atgtccaagttggtgcctatcgcttcccattccttgtctccggacacctccggtccctacgaggagggtgagaaggggaacgcttaccaaaagacatccgacaacgagaagggcgagtacgttgacgtaagtggtcgtgagatcatctccgacgagcataggaagcaaccgaggcaattgcctttgcaagcctactcccattacgcagacatccagagggagtacgagagatccaaggactacgacggattgtacgcagttcaaagagagcaaatgtacacagacgcaaactccaacttgtctccaacgaagttggactcccaaagaatgatgagaatcgctaaggcatactccgttttcttcttgatcacaacagacatcttgggtccatccaacgcaccaaacgctatctcacagatgggttacgtacccggtgtcatcttgtacgttgtattcggtatcgcagcagcatgcggaggatggttgttgaaccactgcttctgcaaggttgactccaacaactaccctatccgtactttctccgacttggcttccagggttgtcgctccctggttcaggtaccccttcggcttgttgcagttcatccaaatgatcttgaactgtgggttgttgttgttgtccactgcccaggcagtatcccaaatgttgatcgtaaacagaggaaaggacaacttctgcttcacggttgacatcttggtttgggccttgttgtgtatgattgccggtcaaatctcctccttgggtaagttcgctcatatcgcaaacagtgccgtttggatgaacatcgcaatctgtatctgtacaatggtgggtgtcgctgttggcggtccatactacggtatcttccaacaatacggtaaaggtcccccttactactaccccgacacattcaacccgttgccaatcgtgaagcacgcaatcgctcctggatccttgggagacagaatcgcagggatgaacaacatggtattcgcatggggtggtgctacaatcttctgcgaggttatggctgagatgaagagacctatggacttctggaagggtatgttgtgtgctcaatccttgatcttggtagtctacttgttctacgggttgttcgtttacacgtacaacggccagttctgctacgttaccgcaaaccaagctatcgcctccgtaggcttgcaaaacgctggcaacgtgttgactatcgtctccggtttgatcgcaatggtgttgtacggaaacgttgctatcaaggtaatctaccaggggttcttggtcgcagacttgggtttccctcacttgactaccaggaagggcacaatcgcatggggcttgttcgtaatcgcatactgggctgttgcttacatcttgggtaccgcaatcccatccatctccgctttggtccaaatcgtaggcgctttctgtatcttgaacttctcctacacattccctttcttgttcggtttctgcttgttgtgcagacaagacgcatccttggcagacaagttcgacttgaagactttgaccgtggagaaggcagactcctacttgagaaacttgagtagatggaagagggctatcgctcatggtggcacccgtagaatcttgatcaagtgctccttgttcttgttgttcttggcatcattggctacttgtggattgtgttcatactccgctatcactggtgccatccaagcttaccaaacgaacacagctcatgccttcacttgtacctccccagtcggttaa

SEQ ID NO: 328 - DNA, 1755 bp, Lachancea cidri
atgtccaagttggtgcctatcgcttcccattccttgtccttgcacaactccaagatctacgacgagggtgagaacaagaagggtcaccatggcaacgctgaggacgagaagggcgagtacttcgacgtcagtggtcgtgagatcatctccgacgagtccggcaagcatgccaggcaattgcctttgcaagcctacttctactacgcaaacatccagagggagcatgagaaggctaaggacttcgacggattgtacgcagttcaaagagagcaaatgtacacagacgctttgtccaacttgtctccaagtaagttggactcccaaagaatgttgagaatggctaaggcatactccgttttcttcttgatcacaacagacatcttgggtccatccaacgcaccaaacgctatctcacagatgggttacgttcccggtgtaatcttgtacgttttgttcggtgttgcagcagcattcggaggatggttgttgaaccactgcttctgcaaggttgactccaacaactaccctatccgtactttctccgacttggctgcaaggatcgtagctccctggttcaggtaccccttcggcttgttgcagttcatccaaatgatcttgaactgtgggttgttgttgttgtccactgcccagtccgtctcccaaatgttggttgtcaacagaggaaaggacaacttctgcttcacggttgacatcttggtttgggccttgttgtgtatgattgccggtcaaatcagatccttgggtaagttctcccatatcgcaaacttcgccgtttggatgaacatcgcaatctgtatcatcacaatggtgggtgtagctgtaggcggtccatactacggtatcttcgagcaatacggtcaaggctctccttacttcgagaccggaacattcaccccgttgccaatcgtgaagtacgcaatcactcctggagctttgggagacagaatcgcagggatgaacaacatggtcttcgcatggggtggtgctacaatcttctgcgaggttatggctgagatgaagagacctatggacttctggaagggtatgttgtgtggtcaatccttgatcttggtcgtatacttgttctacgggttgttcgtttactcatacaacggccagttctgctacgttaccgcaaacgaggctatcgggtccatcgccttgcaaaacgctggcaacgccttgactatcatcactggtttgatcgcaatggtgttgtacggaaacgttgctatcaaggtcgtctaccaggggttcttggtagcagacttcggtttcccttccttgacttcccacaagggcacaatcgtctggggcatcttcgtcgttgtatactgggctgtttcctacatcttgggtaccgcaatcccatccatctccgctttggtacaaatcgttggcgctttctgtatcttgaacttctcctacacattccctttcttgttcggtttctgcttgttgtgcagagaggacgcagctgtcgcagaccatttcgacatcaagactttgaccgtggagaaggcagactcctacttgagaaactggagtagatggaagagggctatcggttacggtggtgcctacagagtattcgtaaaggtctccttgttcttgttgttcttgggatcattggctacttgtggattgtgttcatactccgctgttactgaggccatcgctgcttaccaaacgaacacagctaaggccttcacttgtacctccccagtaggttaa

SEQ ID NO: 329 - DNA, 1755 bp, Zygosaccharomyces pseudobailii
atgtccaagttggtgcctatcgcttcccattccttgtccttgaacacctccaaggccgaggaggagggtgagaaggagaacgttttgcaaaccgcatccgaccacgagaagggcgagttcatcgacgtaagtggtcgtgagatcatctccgacgagaacgacaagaaggcccaccaattgcctttgcaagcctacacttactacgcagacatccagagggagtacgagagatccaaggactacgacggattgtacgcagctcaaagagagcaattgtacacagactccaactccaacttgtctccaagtaagttggactcccaaagaatgatgagaatcgctaaggcatactccgttttcttcttgatcacaacagacatcttgggtccaatgaacgcaccaaacgctgtttcacagatgggttacgtacccggtgtcatcttgtacgttttgttcggtgttgcagcagcattcggaggatggttgttgaaccactgcttctgcaaggttgactccaacaactaccctgttcgtactttctccgacttggcttccagggttgtcgctccctggttcaggtaccccttcggcttgttgcagttcatccaaatgatcttgaactgtgggttgttgttgttgtccactgcccaggcagtatcccaaatgttggttgtaaacagaggagaggacaggttctgcttcacggttgacatcttggtttgggccttgttggcaatgattgccggtcaaatctcctccttgggtaagttcgctcatatcgcaaacttgtctgtttggatgaacatcgcagtttgtatcatcacaatggtgggtgtcgctgttggcggtccatactacggtatcttccaacaatacggtcaaatctctccttacttcgaacccggaacatggaacccgatgccaatcacgcagtacgcaatcgctcctggaactatcggagacaagattggtgggatgaacaacatggtattcgcatggggtggtgctacaatcttctgcgaggttatggctgagatgcgtagacctatggacttctggaagggtatgttgtgtgctcaatccttgatcttggtaatctacttgttctacgggttgttcgtttactcatacaacggccagttctgctacgttaccgcaaaccaagctatcgggtccaaggccttgcaaaacgctggcaacgtgttgaacatcatctccggtatcatcgcaatggtgttgtacggaaacgttggtatcaaggtaatctaccaggggttcttggtcgcagacttcggtttcccttccttgacttccaggaagggcacattcatgtggggtggtttcgtaatcgtctactggggtatcgcttacatcttgggtaccgcaatcccatccatcggtgctttggtctccatcattggcgctttctgtatcttgaacttctcctacacattccctttcttgttcggtttctgcttgttgtgcagacaagacgcagctaccgcagacgagttcgacttgaagactttgaccgtggttcaagcagactcctacttgagaaactggagtagatggaagagggctatcggttacggtggtgccttcagagtcttcgtcaagatctccttgttcttcttgttcttggcatcattggctacttgtggattgtgttcatactccgctatcgttggtgccatcgcagactacgctacgaacacagctcaaccgttcacttgtaactcctccgtctcctaa

SEQ ID NO: 330 - DNA, 1755 bp, Torulaspora delbrueckii
atgacttccttgatccctatcgcttccccaggcttgtccgccaacaccgagagagcctacacggagatcaagaaggaccatatctaccaagactccgttgagcaggagaagggcgagttcgttgacgagttcggtcgtgagatcttggcaaacgagtccgagaagttcgggcacaagttgcctttgcaagcctacacttactacgcagacatccagagggagtacgagagatccaacgaccaagacggattgtacgcagctcaaagagagcaaatctacacagactacttctccaacttgtcccattcaaagttggactcccaaagattgttgagaatcactaaggcatactccgttttcttcttgatcacaacagacatcttgggtccatccaacgcaccatacgctgttgcccagatgggttgggttcccggtgtaatcttgtacgttttgttcggtgttgcagcagcattcggaggatggttgttgaactactgcttctgcaaggttgactccaacaactaccctatccgtacttactccgacttggctggaagggttgtagctccctggttcaggtaccccttcgccatcttgcagttcatccaaatgatcttgaactgtggggcaatcttgttgtccactgcccaggcagtctcccaaatgttgatcgtcaacaagggaagagaccccttctgcttcacggttgacatcttggtttgggccttgttgtgtatgatcttgggtcaaatcagatccttgggtagattcgctcatatcgcaaacactgccgtttggatgaacatcgcagtttgtatcatcacaatggtgggtgtagctgtaggcggtccatactacggtatcttccaacaatacggtcaaggtcccccttacttccaatccggaacattcaacccgttgccaatcacgcagcacgcaatcactcctggaactgtatccgacaagatcgcagggatgaacaacatggtcttcgcatggggtggtgctacaatcttctgcgaggttatggctgagatgaagagacctatggacttctggaagggtatgttgtgtgctcaatccttgatcatggtcgtatacttgttctacgggttgttcgtttacgcctacaacggccagttctcctacgttaacgcaaaccaagctatcgggtccaagggcttgcaaaacgctggcaacgtgttgactatcatcactggtatcatcgcaacggtgttgtacggaaacatcggtatcaaggtcttgtaccaggggttcttgatcacagacttcaacttcccttccttgtcctccaggaaaggcgctgtagcatggggtggtttcgtcatcatcttctgggctatcgcttacatcttgggtaccgcaatcccatccgtttccgctatcgtaggaatcatcggctccttctgtatcttgaacttctcctacacattccctttcttgttctgtttctgcttgttgtgcagacaagacgcagctttgaacgacacattcgaccaaaagactttgtccgtggagaaggcagactcctactggagaaactggagtagatggaagaggtccatcggtcatggtggcaccttcagagtaacattgaaggtctccttgttgttgttgttcttggcatctttggctacttgtggattgtgttcttactccgctatcactggtgccatcgaggtttaccaaacgaacacagctcaaccgttcacttgtaactccccagtaggttaa

SEQ ID NO: 331 - DNA, 1734 bp, Lachancea meyersii
atgtccaagttggtgcctatcgcttccccaaggttgcatcaggccgacgagttggctggagagaaggacccgagatactcctccgaggagcccaaggagggttacgttactggcttggaggttgtatccaacgaagggccaaaccaaagaaagcacttgcccttgcaagcctacatgcactacgcagacatccaaagagagttcgagaaggctggggacgagaacggattgtacgcctcccaagagaagcaaatgtccacagacccacactccaacgtcactacggctaagttggacacacacagaagtttgcgtatcgcaaaggtttacagtgttttcttcttgatcaccacagacatcttgggtccgtccaacgctccgtacgctgttgctcaaatgggttgggctccaggcgtgatcttgtacgtattgttcggtatcttcgctgcttttgggggttggttgttgaaccgttgttactgcaaggttgactcaaacaactacccaatcagaactttctccgacttggctgggagattggtcgcaccttggttcaagtaccctttcgccatcttgcagttcatccaaatgatcttgaactgtggagttttgttgttggggactgcccaggctgtctcccaaatgttgatcgtaaacagaggacaggacaacttctgtttcacagttgacatcttggtatggtcattgttgtgtatgatcgtcggccagatcaagtccttggggagattcgcttacatcgcaaactccgctgtttggatgaacatcgccatctgtatcatcacaatggtcggtgttgcagttggtggtccgtactacggtatcttcgagcaatacggtaagggcttgccttacttccaacctggcaccttcgaccctttgcccatcaagcaatacgccatcactccagggaccatctccgacagaatctccggtatgaacaacatggtattcgcctggggtggtgctaccatcttctgtgaggttatggctgagatgaggagaccaatggacttctggaagggtatgatctgcgctcaaatcttgatcttggtcgtttacttgttctacggattgttcgtctacggttacgacggtcagttctcctacgttacagccaaccagggcatcggttctatcggcttgcaaaatgccgcaaacgtgttgaacatcatcacccaattgatcgctgctgtcttgtacggtaacgtcgggatcaaggttttctaccaaggtttcttggtatccaacttcgacttcccgtccttggactccagaaagggaaccttcgcttggggcatcttcgtcttcatctactggtccatcgcatacatcatcggaacagctatcccttccatctcctctttggtgtccatcatcggttccttctgtatcttcaacttctcctacactttccctttcttgttcgctttgtgtttgttgtgtaggagagacgcctccttggccgacagattcgacccaatcacaatgacagttgagaaggcagactcctactacagaaactggtccagatggaagagagcattcgggcatgggggtgtcactaggactttgatcaagttgagtttgttgttgttgtgcttggcttccttggcaacatgtggcttgtgctcctactccgctatcgagggagccatcgctgcttacgctaccaacttcgctcaaccattcacgtgtgcttcccctgtggcttaa

SEQ ID NO: 332 - DNA, 1737 bp, Lachancea nothofagi
atgtccaagttggtgcctatcgcttccccaggcttgcatacgtcaaactacgagggcacacgtgagaaggagcatccgttgtccacgaacgactccaaggaggactacgttacgggtatcgacgcaatcagcaacgagtccaagaagagatcagggcatttgcctttgcaggcctacatccattacgctgagatccaaagacagtacgagaaggccgacgactccgagggattgtacgctttgcagcaagagcaaatgacaacagacccgaactccaacatcagtactgccaagttgaacacccatcgtacattgaggatcgctaaggtctactccgttttcttcttgatcactacagacatcttgggtcctacaaatgccccatacgctgttgctcaaatgggatgggctccaggggttatcttgtacgtattgttcggagtcttcgctgcattgggtggttggttgttgaacagatgttactgtaaggtagactcaaacaactacccaatcagaactttcagcgacttggctggtagaatcgtagcaccatggttcaagtacccattcgccatcttgcaattcatccagatgatcttgaactgtggtgttttgttgttgggtacggcacaagctgtttcccagatgcagatcgtaacaagaggccatgacggattgtgtttcactgttgacatcttggtatggggtatcttgtgcatgatcttgggccaaatcaagtccttgggtaagttcgcatacatcgcaaactccgctgtttggatgaacatcgccatctgtatcatcacgatggttggtgtagctgttggtgggccatactacggaatcttccaacaatacggtcaaggccctccttacttcaagaccggcacattcgacccattgcctatcgttcagtacgccgttgctccaggcacgatctccgacagaatctccggaatgaacaacatggtattcgcctggggtggtgccacaatcttctgtgaggtcatggcagagatgaagagacccatggacttctggaagggaatgatctgtgctcagatcttgatcttggttgtttacttgttctacggcttgttcgtatacgggtacgacggccaattctcatacgtcaccgccaaccagggaatcggctccatcggattgcaaaacgctggcaacgtattgaacatcatcactcagatcatcgctgcagttttgtacggtaacgtgggcgtcaaggtcttctaccaaggtttcttggtatccaacttcaagttcccatccttggactcccgtaagggcacgttggcatggggatcattcgtcgtaatctactgggctgtagcttacatcatcggtactgctatcccatccgtttctgcattggtctccatcatcggtgctttctgcatcttcaacttctcctacaccttccctttcttgttcgcattctgtttgttgtgtagacaagacgcaggattgacagacaggttcgaccccttgaccttgacagtagagaaggcagactcctactggtccggtttgtccagatggaagagggctttgggtcagggtggaatcaagagatccttgatcaagatctccttgttgttgttgtgcttggcttccttggcaacttgcggattgtgttcctactccgcaatcgaaggggctatcgctgcttaccagacgaacttcgctcaaccattcacttgtgcttctccggttgcttaa

SEQ ID NO: 333 - DNA, 1746 bp, Lachancea mirantina
atgtccaagttggtgcctatcgcttccccaggcttgcaaatgtcattcgacgacgagatggtgagagagaaggagcacgtaagaagtatggacgacgttgacgtcaaggacggctacgttactggacacgaggttatctccaacggtcatgtggggaacgagaagcctttgcccttgcaggcatacatccactacgctgagatccaacgtgagtacgagcaagcaaacgacttggacgctttgtacgcagctcaaaaggagcaaatgatcaccgacccaaacagtaacgtgtccgactccaagttggacacacacagggcattgagaatcgccaaggcttactccgtattcttcttgatcaccacagacatcttgggtccgacaaacgctccatacgcagttgcacaaatgggctgggctccaggtgtcatcttgtacgtattgttcggtgtcttcgctgctttcggaggatggttgttgaacagatgtttctgcaaggttgactccaacaactacccaatccgtacattcagcgacttggcaggcagaatggtagcaccatggttcaagtaccctttcgcaatcttgcagttcatccagatgatcttgaactgtggagtgttgttgttgggtacagctcaagccgtgtcacagatgcaaatcgtgactaagggaaaggacggattgtgtttcactgtcgacatcttggtttgggccttggcatgcatgatcatcggacaaatcaagtccttgggaaagttcgcacatatcgcaaactccgcaatctggatgaacatcgcaatctgcatcatcactatggttggtgtcgccgttggtggtccttactacggtatcttcgagcagtacggacaaggtccaccttacttcgagccaaactccttcaacccattgcccatcgcccattacgccgtcagtcctggaactatctccgacagaatctccggtatgaacaacatggtgttcgcttggggaggtgctactatcttctgtgaggttatggctgagatgagaagacctatggacttctggaagggtatgatctgtgctcaattgttgatcatgatcgtttacttgttctacggattgttcgtgtacggctacaacggccaattctcatacgtgaccgcaaaccagggtatcggatccatcgggttgcagaacgcaggaaacgttttgaacatcatcactcaaatcatcgctgctgttttgtacggcaacgttggaatcaaggttttctaccagggattcttggtgccacacttcagattccctcaattgacatcacgtaagggcaccttcgcctggggtggattcgtggttgtatactgggcagtagcatacatcatcggaactgcaatcccctccgtgtccgctttggtttccatcatcggagctttctgcatcttcaacttctcttacactttcccattcttgttcacgttctgtttgttgtgcagaaccgacgctggtttgggcgacaggttcgacttgtccaccttgactgttgagaagggcgactcctactggagaaactggtccaggtggaagagagccttcggacatggaggttacaagaggtcattgatgaagttgtctttgatgttgttctgtttggcatccttggcaacgtgtggtttgtgttcctactccgccatcgagggtgctatcgcagcctacgctacaaacttcgcccaaccattcacatgcgcttccccagtcgcataa

SEQ ID NO: 334 - DNA, 1713 bp, Lachancea sp
atggctaccaagttggtacctatcagtagtcccggattgcacttgggagacagtgacggattgagagagaaggaggccagattgtcaggaactgaggtcagttccagtgaggagccacatatcactcacaagaccttgccattgcaagcttacatgcattacgcagagatccagagagactacgagagagtaaacgacaccgagggattgtttgccgcacaagctgagcaaatcgaggcagacccgcatagtaacatgagtagtgtcaagttggacgcacaacgtgctttgaggatcgctaaggcttcaagtgttttcttcttgatcaccacagacatcttgggacctaccaacgctccatacgctgtggcacaaatgggctgggctccaggaatcatcttgtacgtcttgttcggtatcttcgctgccttgggaggatggttgttgaccaggagcttctgtaaggtagactcaaacaactacccaatcaggacattcagtgacttggctggaagagctgtagccccttggttcaagttccctttggcaatcttgcagttcatccaattgatcttgaactgtggtgtcttgttgttgggtgtcgcacaagctgtctcccagatgcagatcgtcaccaagggacacgacggattgtgcttcaccgttgacatcttggtatgggcattgttgtgcatggccgtaggtcaaatcaggagcttcaggaagttcacccctatcgcaaacagtgctgtctggatgaacatcgctatctgtatcatcaccatggtgggtgtcgctgtcggagggccttactacggaatcttcacacagtacggaaagggagcaccatacttcgagccagactccttcatcccattgcctgtaaagcatcacgcaattgcccctggaaccatctcagacaagatctcaggaatgaacaacatggtattcgcttggggaggagcaactttgttctgcgaggtcatggccgagatgaagaagccaatggacttctggaagggaatgatctgtgctcaaggtttgatcatggttgtctacttgttctacggattgttcgtctacggatacaacggtcaattctcctacgtgacggcaaaccaaggaatcggaagtatcggtttgcagaacgctgccaacgtattgaacatcatcacccagttgatcgcagccgtcttgtacgggaacgtcggagtaaaggtcttctaccaaggcttcatggtcccttacttcagattccctgagttgatgacacgtaagggtaccgtcgtctggggattcttcgtaacaggatactgggcaatcgcttacatcttgggtaccgctatcccaagtgtcagtgctttggtctccatcatcggagccttctgcatcttcaacttcagttacaccttcccattcttcttcgctttctgcttgttgtggagacaagacgcaggattgaacgacaccttcgacttgactacattgaccgtagagcaaggtgactcctacttgtccggattcagtagatggaagagagctatcgcacatggaggaatgaggagattcaccatcaagttggctttgatgttggtctgcttggccagtttggcaacttgcggattgtgtagttacagtgctatcgagggtgcaatcgacgcttacaagaccaacccagctcaaccattcacttgcacaagtccagtcacctaa

SEQ ID NO: 335 - DNA, 1710 bp, Lachancea lanzarotensis
atggctaccaagttggtacctatcgctagtcccggattgcacttctccgacgacgacgcattgagagagaaggaggccagaatctctggtatcgaggttagttccgaggagtctcatttcaacgacaagaacttgccgttgcaagcttacatccactacgcagagatccagagggacttcgagagaagaaacgacttggacggcttgtacgctgcccaagcagagcaaatcgagagtgacccacactccaacgtattcagtgttaagttggacagtcaaagagccttgcgtatcgctaaggccagttcagtcttcttcttgatcactaccgacatcttgggtccaaccaacgctccatacgcagttgcccaaatgggttgggctccaggtgttatcttgtacgtattgttcggcgtgttcgctgctttgggtggttacatcttgaacagatgtttctgtaaggtcgactccaacaactaccctatcagaacctactccgacttggctgctagaaccatggctccgtggaccaagttcccattggcaatcttgcaattcatccaattgatcttgaactgcggtgtgttgttgttgggcactgctcaagctgttagtcaaatgcaaatcgtaagtaagggtcatgacaacttctgcttcaccgtcgacatcttggtatgggctttgttgtgtatgatcgtaggacagatcaagtccttcggtaagttctcttacatcgcaaactctgctgtttggatgaacatcgcaatctgtatcatcaccatggtaggggtggctgttggaggtccgtactacggtatcttccaacagtacggtaagggtgcaccctacttcgagccagactccttcaaccctttgccaatcaagcactacgcaatcactcccggaaccatctccgacaagatcggtgggatgaacaacatggttttcgcatggggaggagctaccatcttctgcgaggtgttggctgagatgaagagaccaatggacttctggaagggcatgatctccgctcaatccttgatcatggtcgtgtacttgttctacggtttgttcgtttacggttacaacggacagttcagttacgtcacggccaaccagggtatcggcagtatccacttgcagaacgcagcaaacgtcttgaacatcatcacacaattgatcgcagcagtattgtacggtaacgcaggtgttaaggttttctaccaaggattcatggtcccatactgcaagttcccaggattgatgagtcgtcgtggtacaatcgtctgggcattgttcgtcgtagtgtactgggcaatcgcctacatcttgggtactgctatccctagtgtcagtgcattggttggtatcatcggagctttctgtatcttcaacttcagttacaccttccctttcttgttcgctttcttcatgttgtggagacaagacgcaggattggacgaccaattcgacgtatccaccttgaccgttcaaagggcagacagttacttgagtggcttgagtagatggaagagggctatcggtcatggtggttacaagaggttcgccttgaagttggcattgatgttggttgctttggcctctttggctacctgtggcttgtgtagttactccgcaatcgagggagccatcgctagttaccaaaccaacttcgctcaaccattcacctgcacatctccagttgcttaa

SEQ ID NO: 336 - DNA, 1707 bp, Lachancea dasiensis
atggctactaagttggtccctatcgcttctcccggattgcacttctccgacgacgagggattgagagagaaggatgcccctatgagtggtgtcgaggctgtaacctccgagttccaaggtgcaaacaagaacttgccgttgcaagcttacatgcactacgcagacatccagagggactacgagagagttgacgacatggacggcttgtacgctgcccaacaagagcaaatcacagccgacccacactccaacttgtctttggttaagttggacgcacaaagaagtttgcgtatcgctaaggcctacagcgtattcttcttgatcactacagacatcttgggtccatccaacgctccatacgcagttgcccaaatgggttgggctccaggtatcgttttgtacgtcttgttcggcatcttcgctgcttttggcggttggttgttgaacagatgttactgtaaggtagactccaacaactaccctatcagaacattcagtgacttggctggtagaactgttgctccgtggttcaagttcccattcgcaatcttgcaattcatccaaatgatcttgaactgcggtgtgttgttgttgggcaccgctcaagctgtttcccaaatgcaaatcgtcactaagggtacagacggcttgtgcttcacagtagacatcttgatctggggtttgttgtgtatgatcgtcggacagatcaagtctttgggtaggttcgcccatatcgcaaacagtgctgtttggatgaacatcgcaatctgtatcatcactatggtcggggtggctgttggaggtccgtactacggtatcttcaagcagtacggtatgggtgcaccctacttccaagacaactcatggatccctttgccaatccagcaccatgcagtcgctcccggatccatctcagacaagatcggtgggatgaacaacatggttttcgcatggggaggagctacaatcttctgcgaggtgatggctgagatgagaagaccaatggacttctggaagggcatgatctgcgctcaatctttgatcatgatcgtgtacttgttctacggtttgttcgtttacggttacaacggacagttctcctacgtaacggccaaccagggtatcggctccacaggcttgcagaacgcaggtaacgtattgaacatcatcacgggtttgatcgcagcagtcttgtacggtaacgtcggtatcaaggttttctaccaaggattcatggtaccatacttcagattcccaaacttgatgacacgtaagggtacgttcgcatggggtggtttcgtagtcttgtactggtcaatcgcctacatcttgggtacggctatcccttccatctccgcattggttggtatcatcggagctttctgtatcttcaacttctcctacacattccctttcttgttcgctttctgtttgttgtgcagacaagacgcaggattgacggacaggttcgaccccttgaccttgactgttgagaaggcagactcctacttgaacgtctccagatggaagagggccttgggtcatggaggtttcaagagattcgctgtgaagttgtccttgttgttgttgtgtttggcctcattggctacatgtggattgtgctcctactccgcaatcgaaggcgcaatcgagtcctaccaaacaaacttggcccaaccattcacttgtacctctccggttggttaa

SEQ ID NO: 337 - DNA, 1719 bp, Wickerhamiella domercqiae
atgtccttggtgccgatggcatcctacggtttgacaccacacgcctccaaggcatacgacgagtccgagaaggtccgtgacgttgaggttaagcaagagggtgaggttttgtcaagagagaacgacaagcacactcacaagttgccattgcaggcctacacctactatgctggcatccagagaaagtacgaggagtccagagacatcgacggtttgtacgagactcaaatgcaacagatccatacggacccaaactgtaacttgtccgtggagaagttggacagtcaacgtatgttgagattggctaaggcatactccgtcttcttcttgatcactacagacatcttgggaccatccaacgcaccatacgcaatcgctcagatgggttacgttccaggagttatcttgtacgtgttgttcggtgctatggctgctttcggaggatacttgttgaactactgtttctgcaaggtggactccaacaacttccctatccgtactttctccgacttggcttccagagccgtcgctccgtggttcagataccctttcggagcattgcaattcgtgcagatgatcatgaactgtggcttgttgttgttgtccactgcttcctccgtggctcagatgcaagtcacaaacacgggcaagaaccacttgtgtttcactgttggaatcttggtatggggtttgttggccatggtggttggtcaaatcagatccttgtcaagattcgcacacatcgcaaacttctccgtttggatgaacatcgctatctgtatcatcacgatggttggtgcagcaatctccggtccagactacggtgtattctccgcaaactacggctacactgagccatacttcaaccctttgactcaagagcccttgcctatcgcaaaagccgcaatcgctggtggggacttggcagacaggatcgcaggaatgaacaacatggtcttcgcttggggtggtgccacgatcttctgtgaggtcatggctgagttggagagacctatggacttctggaagggtatgttgggtgctcaatgtttgatcttggtggtttacttgttcttcggtttgttcgtttactcttacgacggacaattcagctacgtacaagcaaacatgggtatcatcagtaccggattgcagacagcctccaacgttttgaacgtagtgtccggaatgattgccgctatcttgtacggtaacgttggtatcaaggtcatctaccaaggtttcttggtttccgacttcggcttccctaagttgactacgaagaagggtatggttatctgggccatcttcgtagtagtctactggggtatcgcttacgttttgggaactgcaatcccttccatctccgtcttggtatccatcattggggctttctgtatcttgaacttctcctacaccttcccattcttgttcttgttctccttgatgtggaggcaagacgctggattgggtgacgagttcgactcctccacattgacagtaacaaggggagactcttacttgagaaactggtctagatggaagagggctgctacagaaggcggtagtgttcgtactttggttaaggttgctgttttcttgttgttcttggcatccttggtaacttgtggtttgtgttcctactccgccatcgagcaagctatcgctacatacgctacaaaccaagctcagccgttcacttgtatcgcaaacgtttaa

SEQ ID NO: 338 - DNA, 1701 bp, Wickerhamiella sorbophila
atgtccttggtcccgatctcctccttctccggtgcattggctcccaaggtatccaagcaaatcttcgaggagtcctccgacggtgacgacgagaagaacgtatacgagcattccgacgaggtagagtaccacgacacgaacaagttgccattgcaggtatacactcattacgccgagatccaaagatcctacgaggaggacaacagattggacgagttgtacgaggcacaagagttgcaaagaaagaccgaccctcatgcaaacttgacgactgcaaagttggagtcccagaggcaattgcgtgctgccaagatctactccgtattcttcttgatcactaccgacatcttgggtccatccaacgctccgtacgctatcgcccaaatgggttacgtacctggtgttatcttgtacgtcttgttcggttgcatggctgctttcggaggttacttgttgaacagagcattctgtcgtttggactccaacaactaccccatcagaactttctccgacttggctgctcgttgtatcgggtactggttcaggtacccattcgcaatcttgcaattcatccaaatgatcatgaacgtcggattgatcttgttgggtaccgctactgccgtagccgaggtaatcgtacaataccacggccacaacaccttctgcttcgtagttaacatcttggtatgggcattgttcggaatgttgttgggacagatcaagacattgcatagattcgcacacatcgcaaactccgctgtatggatgaacatcgctatctgtatcatcacaatggtagcagcagctactactaccccttactactccatcttctgggcaaactacggtcatgactacccttacaacactaccgacatcttgaggtacgcaatcactccaggcaccttgtccacacgtatcgctggtatgaacaacatggtattcgcatggggtggagcaaccatcttctgcgaggtcatggctgagttgaagagaccaatggacttctggaagggtatgatctgtggccaagctttgatcttggttgtatacttgttcttcggtttgttcgtatactcctactggggtcaatggtcctacgttaccgccaacttgggcatcgctaagcaaggtttgcaggtggcaggaaacatcttgtccatcatctccgggttgttggctgcagttttgtacggcaacgtgggaatcaaggtattgtaccaaggtttcttggtcgcagacttcaacttcccaaagttgacaactaagaaggggaccatctactgggctatcgctgtggttatctactgggcagttgcattcatcatcggaaccgccatcccatccatctccgcattggtaggtatcatcggtgcattctgcatcttcaacttctcctacaccttccctttcatgttcaacttcgtattgatggttagggaggacgctggaaggggtgacaccttcgacatccagactatcacagtaaccagaggcgacacatggaggaacgcttccagatggaagagaggattgttctacggtggaacctacagatccatggtaaagttggccttcttcttgttgaccttggcttccttggctacctgtggtttgtgctcctactccgctatcgagcaagccatcgccgtataccaaaccaacgtagcaacatccttcggttgttccgcaaacgtgtaa

SEQ ID NO: 339 - DNA, 1707 bp, Pichia manshurica
atgtccgttggcatcgcacctttgggttccttgggagtttcccccaggacttcccgtgtatacgaggagttcgtagagaagaagaagcatttggagggtacaatctcctccgtggagactgtttcccaggacgacgagaagcatacacatgacatgccattgcaagcatacttgcattacgcaggtatccagagggagtacgagaaggccaaggactacggaaagttgtacgagatccaatccttgcaaatgcaaacagagccaaagtgcaacttgtccgaggacaagttgcaattgcaacgtaagttgagaatcgcaaagtcctccgcagtgttcttcttgatcacaaccgacatcttgggtccatacaacgctccatacgctatcgctcaaatgggatacgtcccaggtgtgatcttgtacgttttgttcggtgctttcgcagctatctgtgggtacttgttgaacatctgcttcgtaaagacagactccaacaacttccctgttagaacattcgcagacttgtccgctcgtgctatcggatccaaggtaagagtcttcttcgctttgttccaattcatccagatgatcatgacggtcgctcaatgtgttttgggagccgcttcttccttggctcaattgttggacaccaacttgggtagaaacactttctgttacactgtcaacatcttggtttggtccatcttgggtatggtggttggacagatcaagacattggcacgtttctcctacatcgcaaacttggctgtttggatcactgtagcagtgtgcgttatgacaatggtgggagctgctacatccggtcccaactaccaaatcttctgggcaaactacggtaaggtctggccttacactgttcctgtcttcaagaccgcaatcatgtccggtaacttgtctgccagagtttccggcatgaacaacatggtattcgcttggggaggtgcaaccgtcttcgccgaggttatggccgagttgaagagaccaatggacttctggaagggtatggtcgttgctcaagccttcatcttggtggtttacttgttcttcggtttgttcgtttactcctacttgggccaatactccttcgtgacggcttaccaatccgtgacttccgtgaagttgcagaacgctatgaacatcatcgttatcatctcctacatgttggcagccgttttgtacgggaacgttggtttgaaggctgcttacaacgggatcttcgttccagacttcaacttccctttgttgtccacgcgtaaggggtccgtattgtggccagggatggtcgtgatctactgggcagtggcttacatcatcggctccgctatcccatccatctccacattggtttccatcatcggtgccttctgcatctacaacttgtcctactccttcccattcatgttcatcttggcattgatgtggagatccgacgcaggttcattggactccttcgacttgacctccatgactgtatccaaggtcgactcctacagaaactggtccagatggcaaagggctatgtcctccggtggttggaagaggactgtggttaagttgtccttgttcttgttgtgtttggcctccttggcaaactgtggcttgtgtgcttacaccgcaatcgagggagccatcgagacttacagaacttccgtggctgctccattcacttgcgttgccccagtttaa

SEQ ID NO: 340 - DNA, 1707 bp, Pichia membranifaciens
atgtccgctggaatcgcacctttgggatccttcggagtctcccccagggtctcccgtatctacgacgacttcgacgagaagaaggagcatttggacggaaccgtatcctccgttgaggctgtctcccactccaacgagaagaacgtccataacttgccattgcaagcatacttgcattacgcagaggtccagagggagtgtgagaaggagaacgacttggacaagttgtacgacatccaaaccgagcaaatgaggactgagccaaagtgcaacttgtccgaggagaagttgcaagtccaacgtaagttgagaatcgcaaagtccgctgcagttttcttcttgatcactaccgacatcttgggaccattcaacgctccatacgctgtcgctcaaatgggatacgtaccaggagttatcttgtacgtcttgttcggaatcttcgcagctatctgtggatacttcttgaacatctgcttcgtaaagaccgactccaacaacttccctatcagaaccttcgcagacgtgtccgctcgtgctatctccggaaaggtcagagtattcttcgctatcttccaattcatccagatgatcatgacagtagctcaatgtgtcttgggagccgcttcctccttggctcaattgttggacaccaacttgggaagaaacaccttgtgttacaccgtaaacatcttggtctggtccatcttgggaatgatcgtcggacagatcaagaccttggcacgtttctccagaatctccaacttggctgtctggatcaccgtcgcagtgtgtgtcatgaccatggtgggatccgctacttccggacccaactaccaaatcttctggtccaactacggaaaggtatggccttacaccgtccctgtattcaagactgcaatcatgaccggatccttgtccaacaagatctccggaatgaacaacatggtattcgcttggggaggagcaactgtattcgccgaggtcatggccgagttgaagagaccaatggacttctggaagggaatggtatgtgctcaagccttcatcttgatcgtctacttgttcttcggattgttcgtctactcctacttgggacaatactgtttcgtgacggcttaccaatccatcacctccgtaaagttgcagaacgctatgaacgtaatcgtcatcatctccttcatgttggcagccgtcttgtacggaaacgtcggattgaagtccgcttacaacggaatcttcgtcccagacttcaacttccctttgttgtccacacgtaagggaaacttgttgtggccagtgttggtagttgtctactgggcagttgcttacatcatcggatccgctatcccatccatctccaccttggtctccatcatcggagccttctgcatctacaacttgtcctacaccttcccattcatgttcttgttggcattgatgtggagaatggacgcaggatccttggacgctttcgacttggtaacaatgaccgtaactaaggccgacacttacaagaactggtccagatggaagagggctatcacctccggaggatggaagaggaccttggctaaggtcgcattgttcttgttgtccttggcctccttggcaaactgtggattgtgtgcttacactgcagtcgagtccgccatcgagacctactccaactccgttgcttccccattcacctgtactgccccagtctaa

SEQ ID NO: 341 - DNA, 1731 bp, Candida apicola
atgggtatcttcgggaagaagaaggttgacgagaagcctccgtcagacgttcctagttccagtgacgaagccccaaacgagaaggtggttgagggacatgtaaacaaccatcacacaaacaacatcgcaccggacttcgacgacatctacgacgacttggaggtcgaggtgaaggagacgcatgacttgcccttggagcaatacatgtactacgccaacatccaaagagagttcgagtacagaaaggactaccaaggattgagagagaaccaagcaaagcaaatcgcagaccctcatggtaacatgaacagagtgaagatcgagtcccaacgtgagttgagaaaggcaaacagattcgctgtcttcttcttgatcactacggacatcttgggtccatccaacgcaccatacggcatctcccaaatgggctacgttggtggaatcatcttgtacgtggctttcggatgcttcgccttgttgggaggtaagttgttgcagaactgcttcttgagattggactccgacaactacccgatcagaacattctccgacttgggtgctagaatcttcgggtactggtcccgttacttcgtagccttgttgcaattcatccaaatgatcttgaacgtcggtatcatctgtttgagttcaggccaagcattggcccaatgtatcaactccacagacaagaacccaaaggtctgcttcactgtccagatcttgttctgggctttggcaggaatggttttgggtcaaatcagatccttgagagactactcctacatcgccaactccgctgtatggatgaacatcgctatctgtgttatcacgatgatcggtgcatacttgttcgacccatatggccctgcaaccggtttcccttcaaagggtcctatcaagaggtccgttggtaccacgcagggtttgttcgaccagatgttgggtgtagaccaaatggtattcgcatggggtggtgctaccatcttctgcgagttgatggctgagatggcaaacccaagggagttcatccaaggtttgatgggtgcagacggcttgatcttggttgtatacttgttcttcggtatcttcacatacacatgtcaaggtcagtacgtttccaacccagccaaccaaggcatccagacctgggagttgagattggcagcaaacgtgttgtcattggtctctggcgttttcgctgccgcattgtacggaaacgttggtttgaaggtgttgtaccaaggattcggtgttccagacttgaagttcccggtgttgacgtccaagaagggtgctgtgttgtgggctggtttggtcttcatctactgggcagtagcctacgtaatcggtgcagcaatcccacaagtttccgagttgtccgccttggtgggttccttgtgtatcttgaacttctcctacaccttgccagctgcattcatgttgacattgatgatcagagaggacgcaggtcaattcgacacctaccatccagagaccgctaccgttaccaggatcgactcctggaagaacggagccagatggtccagggctatgaacacaggctcctggaagcgtaagttggctaaggctttcttgttgttcatgactttgggtggattgtgcttgtgtggtatcggtttgtacggagccatccaatccatgatcaacgtatacggtggttcctccaacgcagggaaggctttcggttgtaagccatccaactacaactaa

SEQ ID NO: 342 - DNA, 1734 bp, Starmerella bombicola
atgagtgtcggtgagaagaacgaggcttacgaccaagctcgtttggacggaaccagtgacacaagtgagtcagatggggcaagacgtagtgtaaccggaaccatcaaggagttggacggaaacgtaatcacgaacgtgaccggaggagtcattgccgcaaacgacgacgacaagcatacgagaaacttgcccatggagcattacgcacactatgccgcaatccaaagagagttcgagaacagaaaggactacgagggattgaaggagacgcaaatgcaacaattgagtgaccctcaaagtaacttgtcaatcgccaagatcgagagtcaacgtgagttgagaagagcatccccatacgctgtattcttcttgatcaccacggacatcttgggaccatccaacgcaccatacggtatcagacaattgggttacgtcggaggaatcatcttgtacatcgctttcggaatcttcgccatgatcggaggaaagttgttgaacatggcattcttgaagttggacagtgacaactacccgatcagaaccttcagtgacttggcaagtagaatcttgggaccttggagtcgttacttcattgccggtttgcaattcatccaaatgatcttgaacgtaggaatcatctgtttgacaactggtcaagcattggcccaatgtatcaacagtactgcagacgacccaaagttgtgcttcaccgtacagatcttggtatgggctttgttgggaatgatcttgggacaaatcagaagtttgagagacttcagtcatttggccaacagtgctgtctggatgaacatcgctatctgtatcatcacaatggtcggagcagcaagatgggacccatactacgtagtcactggattggcacccggtcctgtagtagtctccgcaggagctccagctgggagtaccttgttcgacaagatgttgggagtagaccaaatggtcttcgcatggggaggtgctaccatcttcttggaggtcatggctgagatggcaagacccagagagttcgtctacggaatggtcggagcagacatgttgatcatgatcgtctacttgttcttcggaatcttcgtatacagtttccaagggcagtacgtatacgtcgttgcaaaccagggtatcaacccttacggtttgaggttggctggaaacatcttgacaatcgtatccggaatgttggctgcaaccttgtacggaaacgtcggattgaaggttttgtaccaagggttcggagtcccagacttgggatttccggctttgaccagtagaagaggaatcttgttgtgggctgtattggtcgttgcttactggggagttgctttcatcatcggagcagcaatcccacaagtcaactccttgtccagtttggtcggaagtttgtgtatcttgaacttctcctacagtttgccagcattgttcatgttggctttgatgatgcgtgaggacgctagtcagttggactcatacgaccctttgaccggtagtgtaactagacacgacacctggggaaacaggagtagatggaggagagctatcgcatccggaacgtggaagagacatttggcaaagttgttcttggtaatcatgttcttgggaggtttgaccttgtgtggtatcggaatgtacggtgcaatcaagaacatgatcaccacatacggaggaagtagtagtgctggcaaggctttcagttgcagtccagcaaactacaactaa

SEQ ID NO: 343 - DNA, 1767 bp, Starmerella bacillaris
atgaagagattcttcaacagattctccgctggcaacacttcagagaacgagcaagagaagaacgacgcttcaacaaacgtatacagtgtttccgacacttcctcctccaacaacaacaacttcgcaaacaacgagaagtacgtatccgacgagcaggcttacgacgtaccggacgttttgacaaacatcgtcgtcgctgttgacgacgacaagcacaccagaactttgcctttgcagcaatacgagcattacgcagcaatccaaagagagtacgaggacagaaacgacttcgagggtttgcgtgagtgccaacgtgagcaattgtccgacccgcattccaacttgtccgaggagaagatccagtcccagatcgctttgcgtagagcttccaagtactccgttttcttcttgatcacgacagacatcttgggtccatccaacgcaccatacgcaatgatgcaattgggattggtgcctggaatcatcttgtacatcgccttcggcgttttcgctatcatcggtgggaagttgttgtcctacgcattctgtagattggactccgacaacttcccgttgaggacattcgcagacttggctaccagaatcttgggtccatggagcagattcggcgttgctggtttgcagttcatccagatgatcttgaacgttggtatcatcttgttgactactggccaagccttggcccaatgtatcaagtccacagccgaggaccctaagttgtgcttcactgttcaaatcttcgtatgggctatcttgggtatgatcatcggccaaatcagatccttgaaggacttctcccatttggccaactccgctgtatggatgaacatcgcaatctgtatcatcacaatggttggtgcagctaccggtggaccaaactacgaggttgcttggacgagttcccaaatccctaaaggccctgttgacgtatacgcagtagctaagaacgacttgtacgacagaatccagggaatcgaccaaatggtattcgcatggggtggtgctaccatcttctgtgaggttatgggtgagatggctcgtccaagagagttcgttaagggtttgatcggagccgacacattgatcatggtggtttacttgttctacggtatcttcgtgttctgctaccaaggccaattcacatacgctgtggcaaaccagggcatcaaccaatacggtttgcaattggcttccaacatcttgaacatcatctcaggtatgttggctgctgttttgtactccaacgtagggttgaaggtgttctaccaaggtttcggggtacccgacttgaagttccctaagttggacaccatcaagggtgctatctggtggttcgtattggttatcatctactggggtgtcgcattcatcatcggtgctgctatccctcaagttgcatctttgtcctccttggtaggcgctgtatgtatcttgaacttctcctacactttgccagcattgttcgttttcttcttgatcgtccaagacgacgctggctccttggacaagtacgacccattgactggagaggttgagagatacgacacgtggaagtccggagagaggtggaagagagccttcttgttgggtggttggaagaggatcggtatgaagatcttcacgttcatcttgttcttgtgtggattgacattgtgtggtttgggtatgtatggtgccatcgagtccttgatcgaggcttactccgacaacaacgctgtcgcattctcctgtaacccatccttgtaa

SEQ ID NO: 344 - DNA, 1740 bp, Leucosporidium creatinivorum
atgaacgttgctgggaccttgggtgttggtgacgcatctcagttgggaaagatggacgagaagactttgcacgacagcatggttcacactgcacctgctgtcaccggtggtgacggtaagccaacaagtttggctgagtatttgtattgggctgagaagcagagggcagtggaggacgccgacacttcacaggtacattctaagggattgggtcagttgttcgctaagatcaacaagaagcaattggactctaccgagacatctgttgacgagaagacagagcacggtggcatcgacgaccagttggtgggattgacagagagagagacagagttggttaacgctagaagggctttgagattggctgggtggggtgcttgcttctatttgatcacttgtgacatcttgggtcccttctctgctccatacgccatctcacaagtcggttgggtaccgggtgttacattgtacacgttgttcggagctgctgcaggcttgactggctgtatgatcggtagattgttctgtagattggactctgtcaggttcccaatcaggacttacggtgacttggcattgtgtatctttggccctgctgccagacatttctgttctgtcttgcaattcatccaattgatcttgaactgcggcttgatctgtttgagtaacggtcaaggattgtcccaaatcgcaaagggcaacttgtgtttctccgtgtgtatcgtaatctgggcagtcgtagggtgtatcttgggacaaatcagaggtttgtcaaacttctcaatcttggccaactcttcagtctggttgaacatcttgatcatcatcttgtctatggctttcgtagcaaactccccaccaaacttcgagtccgctatcgcaagttacggtgcaaccatcgcctcaggtccaatcgtgacgtctgctgtggtaccgttgcctgttttctcccaagtcacaggtgtcttcaacatggtgttcgcttatggcggagcaatgatcttcccagagttggctgccgagatgaggagaccaagggacttcatcaagggcatggctttggctcaaatcgtcatcttcgttttgtatttggtatatggttgcgtcatatacggtttgcaaggtcagtatacattggccttggcatatcaaggcgtcagtaagtattcatggcaaaccgtgagtaacgtaatcgccttgataaccggttctatcgctgctggtttgtacgggaacatcggtttgaaggttttctatgtcaacatcgtcgaggagttgttcaagggtccacctttgatgtccagagggggtaggatgttgtggtcagtcttggtcttggctttctgggctttggcattcgttatcggtacagctatcccaggcgtcgggtcattgtcaggtttggttgcagcagtttgcatcttccaattcacctacaccttccctccattgttgatgttgggtttggacttgagtatcgatgccgctttggcagacgagcccttcaccacaccaggcgttgctccaaagcaagtggacacttggaggcaagtttcaagatggaagcgtgctatcttggcaggtggaactaagagattgatcatcaagttcttgaacttctggttcttcattggcgcattggccacagccggattgggtatgtgggcttcagggactgctgttagacaaaccttgagcgctggtgctgctacgtcattcggttgtgccgcttctgtttaa

SEQ ID NO: 345 - DNA, 1764 bp, Rhodotorula graminis
atgcaaactgctgccgcagtcggtgtttcagcacctgcttacgaggtaaacgagagtgcacgtgacatgcacgacatgtatgctccggctagtacatcttcaaggatctctattccagagtatatgttctgggctgagagacaaagagctcgtgagagagcagacacaggggacttccactcagctggtttggcatctttggcagcagggatgaagggaaagatcagagagaagggggagaaagggggagacaagtcctcaaactcagacgtacatgaggttacggttggcggagctcaaggcgacgacgcaaccgcagacttggagggattgtctgagagagagaaggagttgtgtaacgcaagacgtatgttgagagtggctggttgggctactatcttcttcttgatcacgacggacatcttgggtcccttcaacgcaccttatgctatcgccaacttgggaatggcaccgggagtcgtattgtatgtcattttcggtttggttgctggtgttactggtgtgatgttgcagcatttgttcttgaagttggacagtgttagatatcccgtgaggacctatggcgacttgggaggcagggtttatggtacttggatgcgtcatttgtgctcaatcttgcaagccattcagttgatcttgaacgtgggtttgatctgtttgtccaacggtcagggtgtagcacagatcgctgaagggggttctggtcccgctatctgtttcagcgttgctgttgtcatctgggcaatcttgggtatggctttgggccagattagatctttgcatgggttgggtttgttggcaaacagtgccgtttggatcaacttgttgatcatcatcttgagtatgggattcatcgctcatagtcccccaaactacgctgccgcattcgctagttacgggatcccagaaggtccggtagtcgtttccgcaagagtcacacaacctgtattcaaccaggtgaacggtttgatgaacatggttttcgcttatggaggtagtatgatcttcccagagttgttggctgagatgcgtagaccacacgacttcatcagatctttcgctatggctcaagccttgatcatcacagcctacttggtatatggttgctatgtctacgccatgcagggacaatacacattggcattggcttaccaaggcgtgagtcactactcttggcaaacggtaggtaacgtcttggctttgatctctggtgccatcgctgcagccttgtatggtaacattggattgaaggtgatctacatcaacatcgtcgaggggttgttgaagggtccacccttgatgacaaagtccggtcgtatcgtctggggtatcttggtcgttttcttctgggctgcagctttcttcataggttcttgtatcccatcagtcggagctttgagtggtgttgttgcatccgcatgtatcttctcattctcatacactttgcctccattgttcgtattgggtttgtacatgcatattgacgcagcaacagccgacgagccattctccaccccaggtgttgcaccaagaagaagagacacttggaagagcttctccagatggcatagagctattacctacggtggttggaagaggaccgctatcaaggtagtcttgttcttgttcttcttggctgctttggctacacagggtttgggtttgtggggcagcgggactactttgggtcaggctttcgagaaaggggctgctacttccttgggttgtacatccccagtctaa

SEQ ID NO: 346 - DNA, 1752 bp, Rhodosporidium toruloides
atggactcagctgccttggcaggtgttgctatccctcaacaggaggcaaacgagtccgagaagcaaatggaccaattctatcaaccgcaagtcggatcagacaagatctctttggctgagtataggtactgggctgccagacaaagagagcgtgagagaaacgacacagccgacttccactcaagaggtttggcatctttcgcacatacggttaagggaaagatcggaaagggtgagaaggaccacgacgttcacgtcagagaggctacggactcacctactttcgacgacgtcgctgcagacttggagggattgagtgagagagagttggagttggttaacgctagaagggctttgagagtcgctgggtgggctaccatattctatttgatcactacagacatcttgggtcccttcaacgctccatacgccatcgcttcaatgggtatggcaagcggtgttgtattgtacgtggtattcggaatcatcgcattcatcactggcgttatgttgcatagattgttcttgcatatggactctgtaaggtatccaatcaggactttcggtgacttgggaggcagagtgttcggctcatggatgagacatttgtgttctatcttgcaagccatccaattggttttgaacgtgggcttgatctgtttgtccaacggtcaaggagttgcacaaatcgcagctggcggaaacggtccagcaatatgtttctccgtggctgtagtaatctggactatcttgggaatcatcgtaggtcaaatcagatctttgcaggggttgggtttgttggcaaactcatctgtttggttgaacatcttgatcatcatcttgtccatggctttcatcgcacactcccctccaaactatgcatctgccgcagcaacctatggcgactcaatcggcactgggccagttgtggtcgtggcaagagttaaccaaccagtattctcacaagtcaacgggttgatgaacatggtcttcgcatatggtggttcaatgatcttccccgagttgatggctgagatgcgtagacctcatgacttcatccgttcaatggctttggctcaagctttgatcatcacctgctatttggtatacgggatctacgtttatgccatgcaaggccagtacaccttgccattggcataccaaggtgttagcagatacgcctggcaaaccgttaccaacgtgatcgctttgatcactggtgctatcgcagctggcttgtatggaaacatcggtttgaaggtcatctatatcaacatcgtggagggattgttgaaagggcctcccttgatgacctccagaggcagagtagtctggtccggtatggtcgttttgttctggggtactgctttcgttatcggttccgcaataccatctgttggtactttgtcaggattggttgccgctgtttgtatcttccagttcacatatacattccctccgttgttcactttgggctactggatttcagttgacgcagctgccggtgacgaggagttctctactccaggtgttgccccaagaagagtcgacaactggacaaacatgagcagatggtctaggggtatcttcggtggtggcatgaagagagtattgtacaagttgggtttgttcttgttcttcttggcagccttggctactgctgcattgggaatgtgggcttctggtacagacttgcgtgaggctttgaagaagggtgctgctacaagcttcggttgtaccgcaccagtataa

SEQ ID NO: 347 - DNA, 1755 bp, Rhodotorula sp
atgcaagctccagcctggtcaggtgctgcagaccctatgatggagggaaacgcaaactcaaaggagatggacatgttgcatcaacaccaaccccatacttcaaagatctctttggctgagtatttcttctgggctgagagacaaagagctcgtgagaagagggacacaacggtcactagccaaccattggccgacgttggtagggccattaaggggaagatcactaagtcagagaagggttcagacgacggtagtgaccataaggttagcgcagaggtacaagacgcagacggagttccagacgagccgtcaggcgacttggttggtttgagcccatatgaggttgagttgtgtgacgctaggagagccttgagagttgccggttgggctactatcttctatttgatcacaacggacatcttgggtcccttcaacgctccttatgctatcgcaagcatgggtttgggacctgggatcgcattgtatgttatcttcggcatcgtcgctttcatcactggttgtatgttgaacaaccaattcttgcacttggacagtatcagatacccagtgcgtaccttcggtgacttgggtggacgtttgttcggaacttggatgaggcacttgtgctccttcttgcaagctatacagttgatcttgaacgtaggcttgatccaattgtcaaacggtcaaggcgttgcccaaattgctgctggacacggtggaatctgcttctcagtagcagtggctatctggtgttggttgggtatcgttatcggtcaaatcaggacgttgagaggtttgggtttgttcgcaaacgcagctgtttggattaacttgttgatcatcatcttgagtatggcattcatcgcacactctccaccaaactacgcagcagcaaaagccgcatatggtatcgaccagggtccagtgcaggtggtcgcagttgtaaaccaacctgtattctcacaggtcaacggcttgatgaacatggtattcgcttatggtggtgctatgatcttcccagagttgatgacagagatgagaaggcctcacgacttcattagaggtatggcattggctcaaggtttgatcatcgtatgttacttggtgtacggtatctatgtttacgctatgcagggccagttcacattggccttggcctaccaaggtgtgtctaagtacgcatggcagactgtgggtaacgtcttggctttgatcactggtgctattgctgccgctttgtatgggaacatcggtttgaaggtcttgtacattaacattgtagagaacacattgaagggtccaccgttgatgtccaagaagggtagattggtatggggtgtagcagttatcttgttctggggtgttgcctatatcatcggctcagccatcccatcagttggtacattgagtggtttggtcgctgctatctgcatcttccaattcacttatacatttccgccattgttccaattggcattggagatgcataaggacgctatcagaggagacgaggccttccaaactgctggagtgagaccaagacaaatcgacacatggaggcaagcctctcgttggaggagagcaatcttcggtggctccacgaagtcaacaatcttgaagttcgtctatttcgtattcttcttggctgcattggctactgcaggtttggggatgtgggcttctggtaccgacttgagagacgctttgaagactggtgctgcaacgtcattcggttgcacagctcctgtataa

SEQ ID NO: 348 - DNA, 1740 bp, Microbotryum lychnidis
atgtctgttggcaagcacacaatcgacgacaagtcccatagcatcggagagaagaagaacgacgttgacttctcaaacagattggtggctggccctatggactcccaaccagtgtctttggttgagtatatccattgggctaagatccaacgtgagatcgaggcacatgacaccactcaggtaaagactggcggattgggtcccttggggaagatgatcgcacaaaagatggacaagactggtgggaagggtatgacagtttctgctgaggtccaacaaagaatggaggccgagttggagcagatgcagggattctcccctcatcatcaagagttgtcaaacgctagaaggatgttgagacaggctgggtgggctactgtgttcttcttgatcactacagacatcttgggtccctataactctgcttatgccatctcaacagtaggtttggttccgggtgtttgtttgtacgccttgttcggagctgctgcaggcttcactggctacatgatctggaagatgttctgtcaattggactctgtaaggttcccagtaaggcattacggtgacttggcagagagaatctatggcgcatgggccagacatgtttgttctatcttggttacgttccaattgttgttcaactgcggcatcgtcatcttgggcaacggtcaagcattgacacaaatcgtcaagggcaacatctgtttcacagtgtctatcgtcatctgggcagtagttggggctgttgtttccttcgttagagagttgcatgctttctcagtcttcgccaacttctcagtatggttgaacatcttgatcatgatcttgtctatggctttcgtcgctcattccccaccaaacatcgcaggagctatcgcagcctatggtgactccatcggcacaggtccagtcgtgatcaaggctttcgttggtggctcattgttcaaccaagtaaacggtgcattcaacatggtgttcgcttatggcggaggtatgatcttcccagagatcatcgccgagatgaggagaccatacgacgctatcaagggcatcgcttgcgctcaaatcttcatcttcactgtttacttgttctacggtgtcttcatctattgtttccaaggtcagtacacattgcccttggcataccaaggcgtaagtaagtacgcttggcaatgcatcggcaacggcatcagtttgttgaccgttactgtagctgctggtttgtacgccaacgtaggtttgaagatcatctacacaaacatcgtagagagcgttttcaagggaccatcattgatgtccaggaagggtcagatgatctggttgcctatggtaatcatctggtgggttgtagcatgggttatcggtacaggtttgccaggcttgggtgctttgactggtttggttggagcagttgcaatcttccaattgtcctacaccttccctccattcttgatgttgggtttgactgttggcatggacgcctcattggcagacgagcccttcaccacaccaggcgttgctccaaagaggatcgacacttggagggacttctcaagatggaagcgtggtttcgctgcaggtggatctaagagattggcctataagatcttcaacgtcttcttcttcattggcgcattggccattggcggattgggtatgtggggtacagggactgctttggctcaaaccatcaaggctggtgctgctagctcattcggttgtgccgctccagtttaa

SEQ ID NO: 349 - DNA, 1665 bp, Auricularia auricula
atgagtggtcccgagaagtacgacgagaagaacggagttacgagggcagctagtcccttggccactacagacagtagcgacgaccgtgttgtctccgttacatcccaattggctggtccagttttgttcgaggactacttgcattacgctcagatccaaagggagttggagaagcaagacggaagaactgtcgactacccagacttccaggacaagtccggaaacgcaatgtacccggacagagagagggttttgtccgacttggaggtggagagaatcaacgccagacgtatgttgagagtggcttcatggtggtccatcttcttcttgatcactacagacatcttgggaccattcaacgcaccattcgcattcgcttcagttggtttcgttccaggagctatcttgtacttcttcatgttcattgctgccacttggacaggagctttgttgtggttcatgttcatcaagttggactccgacagataccctgtgcgtacttacgcagacttggctgagagaatcttcggtcgttgggctagacacttctgtacaatcttgcaaagtatccagttgatcttcaacgtaggcttgatctgcttgagtagtggtcaatccttgagtcaggtcagtagtgctaagttgtgcttctccgtctgtgtagtggttttcgtcgtagttggattgatcatcggtcagatccgtactttgaacgacttcacaaccttggcaaacggagcagtgtggttgaacttgttgatcatcttcatcagtatgggtatcatgtcacacagtccaccaaacatcgcaagtgctgtcgctacattcgggaaggagagagcatccggtccagtacatacagaggcattcgtcagtcaacctttgttcgacaaggtcaacggcatcatgaacatggtgttcgcttatggtggtgccatgatcttccctgagatggcagagatgagaaggcctatggacttctggaagggcatgatcgctgctcaaacattgatcttctgcgcttacttgatgttcggaatcttcgtctacgccttccaagggcaatacactttgccagttagttaccaaggaatcagtaagttcggtttccagactgcatgtaacacgatcggtatgatctcaggcatcattgccgcaggcttgtacggtaacatcggcatcaaggtcgcctacatcaacatcatcgaggactggttcaacggtccacctttggtgagtagaaaggggagattcatctggttcggaatggtgacgttgtactggagtttggcattcgtgatcgtctctgctatccccagtgtgggtagtttggctggcttggtagcagctgtatgtatcatgcaattcacatactcctttccccctgtgttgatggttggttacgagatcatcgttgacgccatggagggtgagacatacactcctggtgcaggaacatcacataggatcgacacctggaggcagtggagtaggtggagaaggggtttgttcggtggcagatggtacatcaagttggttcatttggtcgtagctttggcagcattctcaatggctggtttgggtatctggggtactggcttggccgttaagcaatccttggacaacggtgctgcaacaagtttcggatgcaagcctccagtttaa

SEQ ID NO: 350 - DNA, 1611 bp, Jaapia argillacea
atggctagtatcgccaacatcgctggagagggagcaccaatcaagatcgaggacgccgacgtttacgtcgttcctgtgcaaccaggtccagaggtaatcagatccacccaaaagatcccattccaagcatacttgaaccaagcagagttgacacgtgctagggaggcacgtggagaaccggcaaccagtaaccctcaagagaaggagatggagacaccttccttgtccagttacgagcaagagttgatcaccgcaaggagagctttgcgtactgcaggatgggttagtgttttctacttgatcaccacggacgttttgggaccattcaatgccccatacgctttcagtcaagtcggatacgcaccaggggtcatcttgtacttgatcatgggagctgtcgcttgttacaccggtttgatcttgtggcacttgttcttgaagttggacagtgaccgttacccaatcaagacttacgcagacttggctgagaggatcttcggaacttggttcaagcatttgtgtagcgtattgcagagtgtccaattgatcatcatcgtaggaactatctgcttgtcctgcgcacagagtatcgagcagatcgctttgaacagaaagatctgcttctcagtagctatcttgatctgggttttcgtaggaatggtcatcggacaaatccaaaccttgaagagttacggatggttggccaacttctccgtgtggttgaacttgatcgtcatcttcgccagtatgggattcgtcgctcatagtccaccaaactacgcatccgccacagctgcttacggaccggaggtcgcttccggaccaatccacaccggagtcttcgtaaacttgcctatcagttccaaggtcaacggaatcatgcagatggtcgcagcatacggaggagctatgatcttcccggagttcatggcagagatgagaagacctatggacttctggaagggaatggtatgctctcagttgttggtatgtaccgtctacgtcttctacggaatcttcgtctacgcattccaaggacagtacactttgcccttggcttaccaaggagtcagtaagtacgcttggcaaactatgggaaacgcaatcgccatgatcactggaatcgttgctgcaggattgtacggaaacttgggaatcaagatcgcttacatcagtatcgtagaggagtggatcaacggaccgcctttgatgtccagaaagggaagattgatctggaccggaatggtgttgttgtactgggccttggctttcatcgtcgccagtgcaatccctcaagtgcaaacaatcagtggattggtagccgctatcgcaatcatgcaattcacttacaccttccctccattgttcttgttgggattcgacatggtggtcgacgctagtaagaacgaccctggagacacatggaccagtttgtccaggtggagaagagcagcattctcaagaaggtggttcttcaagatgttcaacttcgtattgttcttgggatccgtagtcttggctggattgggaatgtacggaagtggagtattgatcaaggtcactttcgagaacggtgtcgcaacctccttcagttgtacaagtccggtctaa

SEQ ID NO: 351 - DNA, 1584 bp, Gloeophyllum odoratum
atggctagttacgccgtccctgctaccatcgcaggagagggggtggcaaagcctcccagtgacgacgtttcagtacacagttaccgtgagtccggaaaggtatccttccaaacatacttggaccatgcagagcaaagcagagcaagagaggccaagggtgagactagtgggtccgagagcccaaacgagaagaggccaagtttgactccgcatgaggaggagttgttgaacgctcgtagagctttgaggaccgcatcctgggctagtgtgttctacttgatcacgaccgacatcttgggtcccttcaacgcaccctacgcattcagtcaagtgggtttcgttccaggtgcaatcttgtacgtcgttatgggtgctgttgcctgttacaccggtttgatcttgtggagattgttctgcagattggactccgagagataccctatcaagacctacgccgacttggcagagaggatcttcggaaagtggttcaggcacttctgtgcattgttgcaaagtttgcaattgatcatcaacgttggtaccatctgtttgtccaacggtcaaagtgtgcagcaaatcgcaaacgaccacggattctgcttcagtatcgagatcttgatctgggccttggttggtatggttgtgggccagatcaggaccttgaagaactacggatggttggcaaacttggcagtttggttgaacttgttgatcatcttcatctccatgggtttcatcgcacacagtccaccaaactacgctagtgcttaccaagcttacagtgtctcacccggtccagtacatacgagtgctttcgtcagtttgcccttgtacagtaaggtaaacggtatcatgcaaatggtcttcgcatacggtggtgcaatgatcttccctgagttcatggcagagatgaggcgtccgatggacttctggaaggcaatgtgttgtgcacaattgttgatcagtactgtctacatgatgtacggtatctacgtatacgctttccaaggtcaattcacattgccattggcttaccaaggcgtttccaagtacagttggcagaccgtaggtaacgttttggctttgttgactggcatcatcgcagcagggttgtacggcaacatcggcatcaaggtggcctacatgcatatcgtcgaggagtggggtcatggtccacccttgttgtccaagaagggcagagtgatctggttcttcatggttatcttgtactgggccttggctttcatcgttggtagtgcaatccctcaagtgcagaacatcagtgcattggtagctgccgtatgcatcatgcagttcacctacaccttccctccattgttcttggtcggttacgagatgatcgttgacgcaatgatcgacgaccctggggacacctggtacaactacagtaggtggaagaggggtttcttcactggaaggtggttgttcaagttgttcaacttggtattgttcttgggagcattgagtatggcatgcttgggcatgtacggaagtggcgagagtatcaaggcagccttcactacctcccatgctaccagtttgggttgcagtccgccagtataa

SEQ ID NO: 352 - DNA, 1587 bp, Trichaptum abietinum
atggcttccacggccttgcaaatcgcagacgacaggaagcacgtggtattggacgagaagacggctggtgtggcagacggatccagtgcttcatccgttcatgacgacttgcgtttgccatccttggcagagtacatgcaacaagctgagttgagcagagcaaccgaggcccacgttcacggatccgagtcacctgaggagaagttggacatcgaggacgacttggtcaacgctcgtagagctttgaggactgcatcttgggctgctatcttctacttgatcacgacagacatcttgggtcccttcaacgcacccttcgcattctcccaagtgggttacgttccaggtgcaatcttgtacgtagttatgggtttggttgcctgttacactggtttgatcttgtggagattgttctgctccttggactcacacagataccctatcaagacttacggggacatcgtcgagaggatcttcggaaggcaaccaaagtacttctgtgacgctttgcaatccttgcaattggtcatcaacgttggtacaatctgtttgtccaacgctcaatccgtggagcaaatcgcaaacaaccacaagttctgcttctccatcgctatcttgatgtgggccttggttggtatggttatcggccagatcaggacattgaagtcctacggatggttggcaaactccgcagtttggatcaacttgttgatcatcttcatctcaatgggtttcatcgcacactccccaccaaacttcgtttccgctatggctgcttacggaattggtcccggtccaatcgtcaagtccaagttcgtatccttgcccttgttcaacaaggtcaacggtatcatgaacatggtattcgcatacggtggtgcaatgatcttccctgagttcatggcagagatgaggcgtccgatggacttctggaagggcatgtgttgtgcacaattgttgatcacagtagtatacatgatgtacggtatctacgtctactccttccaaggtcaattcaccttgccattggctttccaaggcgtttctaagttctcctggcagacagtcggtaacgttttggctttgatcacaggcatcatcgcagcagggttgtacggcaacatcggcatcaaggtggcctactaccaaatcgtagagaagtggttcaaagggccaaagttgatgacctcaaagggcagagtggtatggactttcatggttttgatctactgggccttggctttcatcgttggttccgcaatccctcaagtgcagactatctccggattggtcgctgccatctgcatcatgcagttcacatacacattccctccattgttgtgggcaggtttccatatgagattggacgcagctatcaacgaccctggggactcctggtactccttgtccaggtggaggagggctttgttcaccggaaagtggcatttcaagttgttcaacttggtcttgttcttggcatctttgtccatggcatgcttgggcatgtacggatccggcaaggctatccaacaaaccttccaatccggaggtgctgctacatcattcgggtgtgggtcccctgtttaa

SEQ ID NO: 353 - DNA, 1638 bp, Marasmius oreades
atggcttcaaacgagaaggacaacggtatcgacgcagttggggagaagagagagatcgcaagcaacgagcagacaacggacttgccagctggcacatctgtagacagagacggcgacttgactttgagggactacatgagattcgctgctatcacgagaagtaaggagaatgccggtccgggaggtttcagggagccagctcccggaatcttggggaagtccggtgtagaccaacaggagatcgacgcagctaggagggctttgagaacggcaggttggatgagcgttttctacttgatcaccacagacatcttgggacctttcaacgcaccgttcgctttgtctcaagtcggttacgttcccggtacgatcttgtacgtggttatgggtgctgctgcatgttacactggtttgatcttgtcaaacttgttctgtaagttggactctttcgagtatccagttagaacctacgccgacttgggaggtagagtcttcggccattggttcaagcatatgtgtactgccttgcaaagcttgcaattggtcatcaacgtaggcactatctgtttgagcaacgcacaaagtgtagagcaaatcgccaaccatcataagttctgtttctctgccgcaatcatcatctggacgatcgtcggcatggtaatcggccaaatcaggacattgaagtcatacggctggttggcaaactctgctgtctggttgaacttgacggttatcttcaccagcatgggtttcgtagctcattctccaccaaacttcgcttcagcaaaagccgcttacggaatcgaccctggtccaatcatcaaggagacgttcgtatcattgcccttgttctccaaggtaaacggcatcatgaacatggtattcgcctacggaggagctatgatcttcccagagttcatggctgagatgaggcgtcctatggacttctggaagggaatggtttgtgcacagttgttgatcactactgtctacttgttgtacggtttgttcgtctacagtttccaaggccaatacacattgccattggcttaccaaggtgtgtcaaagcaagcatggcaagacgttggtaacgtcatctcagtcatcacggggatcatcgctgctggcttgtacggcaacatcggcatcaaggtcgcatactaccaaatcgtggagggctggttccatggcccagccttggtgtccagaagaggaaagttggtttggcctttcgtggtaatcatctattgggctttggcattcatcgtagccagcgctatcccacaagttcaaactatctccggcttgatcgcagcaatctgcatcatgcaattcacgtactcattcccacctttgatctggttgggttaccaaatcagattgcatgccgagggtttgcatgacgttaacggagacagtggctcagacaactccgaccctggtgactcttacttgacatggtctaggtggaagaggggattgttcggtggtaagtggtacttcaacttgttcaacttggttttcttcttgggaagtactgctatggcatgtttgggtatgtacggtagcggtacggctatcagagagactttcaagactgcccaggctacatcattcggctgcaagtctccagtctaa

SEQ ID NO: 354 - DNA, 1629 bp, Gymnopus alpinus
atgagtgagaagatcgtccaagacgagaaggcatccggtacagagtccccagagttggcaccggagttgaaggaggagaccgttttgatcgagcaaccaagtttcagagactacttgatctacgcatccgtgagtcgtttgaacgagagtaagccgcatgagactcctatggagatcaagcatatcagaaagactgagcatcagagagagttggaccaagcaagaagagcattgcgtaccgctacgtgggtttccatcttcttcttgatcactaccgacatcttgggtcccttcaacgctcccttcgccttctctcaagtaggttacgtaccgggtgctgttttgtacgtcgttatgggtggcatcgcctgtttcaccgggttgcaattgtggcaattgttctgtaagttggactctcatgagttccccgtcaagacctacggagacttgtccgggagaatcttgggaactccgttcagacacttgaccactgtgttgcaatccttgcaattgatcatcaacgtgggagttatctgtttgtccaacgcacaatccgtcgagcaattggctgcccaccacgagttctgtttcagtatctccgttttgatctgggctttcgtgggtatggtcttgggtcaaatccgttctttgcagaagtacacctacttggcaaactccgctgtctggatcaacttgttgatcatcttcacctccatgggtttcgtcgcccatagtagtccaaacttcggtgctgcattggctagtttcggtaccttgccaggacctgtggacaccgagaagttcgtgagtttgccaatcttcgacaaggtgaacggtatcatgaacatggttttcgcttatggtggcgcaatgatcttccctgagttcttggcagagatgaggagaccaatggacttctggaagggtatggtctgcgcacaattgttgatctgtatcgcatacttgttgtatggtgccttcgtttactccttccaaggtcaattcaccttgcctttggcctaccaaggcgttagtaagcagagttggcaagacgttggtaacgttttggctttgatcaccggtatcatcgcagccggtttgtacggtaacatcggtatcaaggttgcctactactctatcatcgaggactggttcaaaggccctgctttgacgagtagagctggcagggtcatctggagtatcatggttatcgtatactggagtttggcattcatcgtaggtagtgccatcccacaagtagccactgtatctgggttggtggctgcaatctgtatcatgcaattcacatacactttccctcccttgatgatgttgggctacaagatgcaaatcggtgcagctggtttggtagaggaggactccttggccttgggtgaggttatcgacccttccaccccctccaaggacccaggagacacttggagacaatggtccagatggcaaaggggtttcttcgcacaccagtggtacatcaacttgttcaacttgatcttgttcttggctagtttgtccatggcttgtttgggaatgtacggtagtggcaccgccatcaaggttactttcgagaacggtgctgccacatctttcggttgtactacacctgtttaa

SEQ ID NO: 355 - DNA, 1695 bp, Pholiota squarrosa
atggcttacaacatcgcaaacgtagctatgactgagccaatccacgagaaggagaaggcagacagaagttcaagtatcaacagtccggctactgtaagtaccaggagtggtgagatcgctttcgaggactacttgcacttcgcagctttgcagcgtttggaggaggatggtggcttggagaaggctgctggcaagcaaagttggttccacagattgtccgcacataagggaccaaacgtaaacgtggacatctccgacgctaagagttaccctatgaccgagtacgaggaggaccaagctcaggcttcaaaggccttgaggttggctagttgggctagtgtattctacttgatcactaccgacatcttgggtccattcaacgctccattcgctatctcccaagttggttgggtaccgggtgtagtattgtacttcgtaatgggagctatggcattgtacaccggattgatcttgtggagattgttcatcaggttggacagtgcaagatacccagtaaagacctacgcagacttggctgagagaatcttcggtagagcagctagacatgccgtgaacgcattgcagagtttgcaattgatcatcaacgtagctaccatctgcttgtcaaacggtcaagctttgagccagatcgcaaacttcaagttgtgtttctccgtttgtatcgtaatctgggctatcgttgggttcgtaatcgggcaaatcaggacattgaaggcatacgggtggttggcaaacagtgctgtatggatcaacttgttgatcatcttcacaagtatgggattcgtggcacatagtgcaccaaacttcacagctgctaagacctccttgggtgttgaccctggccctgtaatcaccgctaagttcacaagtttgcctttgttcttgaagatcaacgggatcatgaacatggttttcgcatacggtggagcaatgatcttcccagagatgatggccgagatgaagagacccatggacttctggaagggtatgactatggcccaagctttgatcttcgttgcctacttgttgtacggttgtttcgtatacgctttccaaggtcaattcaccttgcccttggcttaccaaggggtgagtaagcatagttggcaaaccttgggcaacgttttgagtttgatcacaggaatcattgccgctggcttgtacggaaacatcggcatcaaggttgtatacatcaacatcgtagaggactggttgaagggtcctcgtttgatgacccctaagggaagaatcgtgtggtctggtttggtattcgcttactggtccttggctttcatcgtaggcagtgctatcccacaggtacaaactatcaccggtttgatcgctgctatcgctatcatgcagttcacgtacagtttcccaccattgttgaggttgggctacgacatcatcaccgacgcaatggcagtagacaacagacacgctcctggtatgggcactaaggccagaatcgacacttggaaccaatggtccagatggaagagaggtttgtttggcggtagagtatggttcaagttgttcaacttggtgatcttcttgggaggtttgagtatggcttgcttggggatgtggggtgcaggcgaggctatcaagtccaccttccagttgaacggagctgctaccagtttcggatgcagaagtccattgcaaggctaa

SEQ ID NO: 356 - DNA, 1719 bp, Agrocybe cylindracea
atgacttcaacggggatcgcaaacgctgctttgagtgagccgatccacaagcatcgttcagacgagaaggtgacattgtcagagcgtgagcacgactctttgagtacagactccgctgctagaagggacgacgttgtgttcgaggacttcttgcactacgcagcattgcagaggttggaggaggacgaggtagcaggtaagtatgcagccgctagcacccatggtaactggttgagcagattgagcgcacataagggaccaaacatcaacgtagtcgtcggtgagagaaaggcagagatccccatgacggcagacgaggacgagagagcaaacgcttctagagctttgaggttggctggttggggtagcatcttctacttgatcactacagacatcttgggtcctttcaatgctccgtacgctatctcccaggttggttgggtcccaggtgtagtgttgtacttcgtaatgggtgcaatggcattgtacacaggcttgatcttgtggagattgttcatcagattggactctgtgagataccctttgaagacatacgcagacatcgctgagcgtatcttcggtcgtggtgccagacacgtagttaacgttttgcaaagtatccaattgttggttaacgttgctacgatctgcttggcaaacggacagtctttgagtcaaatcagtaagggtaagttgtgcttcagcgtttgtatcgtgatctggaccatcgttggattcgtaatcggtcaaatcagaactttgaagaactacggttggttggcaaatggtgccgtttggttgaacttgatcatcatcttcacttcaatggggttcgtcgctcattccccaccaaacttcgcagccgcaatgcaatctttgggagtatcccctggacctgtccagacacaattgttcgggacgttgccattgttcaagaaggtcaacggaatcatgaacatggttttcgcatatggtggtgccatgatcttccctgagatgatggctgagatgaggagacccatggacttctggaagggaatgactttggctcagttgttgatcttcgtcgcttacttgttgtacggtgctttcgtatacgctttccaagggcagttcaccttgccattggctttccagggcgtgtccaagttcgcctggcagacattgggtaacggtatcgccttggtaaccggtatcattgccgcaggtttgtacggtaacatcggtatcaaggtgatctacatcaacatcatcgaggactggttcggtggtccgagattgatgacaccaaagggtcgtatcatctggactaccttggtcttcgcttactgggctttggctttcatcatcggatcagcaatcccacaagtccaaaccatcaccggtttgatcgctgctatcgctatcatgcaattcacctattctttcccacctttgttgagattcggttacgacgtcatcacagacgctatgtcccaagatgccgcttacgttcccggttccggtgcaagtggtagggttgactcttggaaggagagatctagatggaagagaggtttgttcggtgggagatggtacttcaagttgttcaacttcatcttgttcttgggtggtatggtaatggcttgtttgggcatgtggggtgcaggcgagtctatcaaggcaactttcgagcaatctggtgctgctaccagcttcggttgtactgctccggtttaa

SEQ ID NO: 357 - DNA, 1698 bp, Psilocybe inquiline
atggcttacaacatcgcaaacgttgctcaaacccctactgggttcgtcaacgagaagtcagagaagggtcacgacagcttgagagagtctgcatccccagaccctggtgctccccatggtccagtcgtcttcgaggactacttgcattatgctgccaagcagaggttggaggaggacttgagattgggtatcgcaccagacgagtcaacgtcttggttctcctctttgtcatcacacaagggtccgaacgttaacgtcaaggttgctgaggtcagagaccatccgatgaccgcattgcaagaggaggacgcacgtgcatccagagctttgcgtttggctggttggatgtccatcttctacttgatcacgacagacatcttgggtccattctctgctcctttcgcaatctcacaggtgggttgggttccaggcgttgtaatgtacgttgttatgggtggtatggcattgtacacgggattgatcttgtggaggttgttcatcaggttggactcagagagatacccgatcagaagctacggtgacatggcagagagattgttcggacaagctgccaggcaggtagtgaacgtcttgcagagtatccaattggttgttaacgtggctacgatctgtttgtcaaacgggcaggcattgtcccaaatcaccaacgctaagttgtgtttctcagtttgcatcttgatctgggctttggcagggttcgtaatcggccaaatcagaaccttgaagaactacggatggttggcaaactctgctgtttggatcaacttggtgatcatcttcacaagcatggctttcgtcgctcatagtccgccaaacttcgcagcagctttgtccgctttcggcacccctgagggtccagtagtcaccaacaagttcacaaccttgccattgttcttgaaggttaacgggatcatgaacatggttttcgcatacggaggagctatgatcttcccggagatgatggctgagatgagaagaccaatggacttctggaagggcatgactttggctcaagcattgatcttctcagcctacttgttgtacggttgtttcgctttccaaggtcaattcacccaagctttggcatatcagggtgtctctaagcacgcttggcagaacgtgggcaacatcttgtcattgatcacaggtatcattgctgctggcttgtatggtaacatcgggatcaaggttgcatacatcaacatcgtagagggctggttcaatgggccaagattgatgactaccagagggcgtatgatctggacagttatggtttgcgtctattggtctttggcattcgtgatcggttccgctatcccacaagtccaaacaatctcaggtttgatcgcagctatcgctatcatgcagttcacttactcattcccacctttgatgaggttgggttacgacgtcatcaccgacgcaatgtcagcagacgccgagtacgttccaggcacaggaaacgcttgtagggtcgacagttggagggactggagtagatggaagagaggaatcttcggtggtagggtatggttcaagttgttcaacttgatcatcttcttgggaggtatcgctatggcctgcttgggtatgtggggctccggtaagtcaatggtacatacgttccagatcgctggtgctgcaacttcattcggttgtaagtctccagtcgcctaa

SEQ ID NO: 358 - DNA, 1740 bp, Sphaerobolus stellatus
atggctactgccttgtacaactctgctatctccgagccaatccaccaaccattcacctcagagaaggagaaggacgtggagagagacgactccgtctctcatgagttctctggcgctggtgacttgttccacccagtgttcgaggactacttgcactacgcagcaatccagaggttgaaggaggacggtatcgaggttggtaaggttgccccagagaccatcgaggagaagagaaactggttcagcaggttgagtgagcataagggtccgaacgtcaacgttaacgttcgtcatatcacacccagaaagttgaccccagacgaggaggagcgtgagaacgctgctagagcattgagattggcaggttgggcagctgttttctacttgatcactacagacatcttgggtccattcaacgctccattcgccatctctcaagtcggatgggttcctgggatcatcttgtacttcttcatgggattgatcgctttgtacaccggtttgatcttgtggagattgtacatcaggttggactctttgagataccctttgagaacctacgcagacatcgccgagaggatcttcggtaaggcagccaggcatacatgtactatcttgcagtctgtgcagttgttggttaacgtggctaccatctgcttgtcaaacggtcaagcattgtcagagttgactcagaacggcaccgggatgggtggagtgtgtttctccgtggctatcgtcgtatgggctttcttgggaatgatcgtcggtcaaatcagaactttgaagaacttcacttggttggcaaactcagctgtttggatcaacttgatcatcatcttcacatccatgggtttcgttgcacactcccctccaaacttcgcagctgccaagaccagtttgggcgtcgaccaaggtccggtgatcactacgaagttcggccatttgcctttgttcatgcaagttaacggcatcatgaacatggttttcgcctacggtggtgctatgatcttccctgagatcttggctgagatgagaaggcccatggacttctggaagggtatggctatggctcaagctttgatcttcgttgcatacttgttgtacggtgccttcgtttacgctttccagggtcaattcaccttgcccttggcttaccaaggcgtctcaaacttcaagtggcagtccgtaggcaacgccttgagcttggttactggaatcatcgctgctggattgtacggtaacatcgggatcaaggttgtctacatcaacatcatcgaggactggttcaacggtccacgtttgatgacgttcaagggcagaatcatctggagttcattggttatcttgtactgggcattggctttcatcatcggtagtgctatccctcaggtccaaactatcactggtttgatcgctgcagtagctatcatgcaattcacctactcattccctcctttgttgagattgggttacgacgtcatcacggacgctatggcagcagacaaggagtacgttcccggtcaaggtgctagtggcagagttgacacatggagaaactggtccagatggagacgtggtttgttcggaggtagatggtacttcaagttgttcaacttgttgatcggtttgggtggcttggctatggcatgcttgggtatgtggggagctggagagtctatcaaggctgttttcgccttgtctggtgctgctacgtcattctcttgtaagtcaccagtttaa

SEQ ID NO: 359 - DNA, 1674 bp, Mycena chlorophos
atggcagacatcacgcctccttctgagaagatcgacgagaagaggagtgaggagggcgtcagctctggtgtggacagcttgaagagcaacaccgacatcggtcctgtttggttcgagacttacttgtactacgctgccttgcaaagacatgaggaggaccccaagcctccgaagggtatctcaaagttgttctacgacttgtcctcacacaaggggagtaacgttaacatcgacatcggtccacacatcgagagggagagagctatcccgttggaggagagagaggctgccgcaagagctttgagattggcatcctggagttctgttttcttcttgatcactacagacatcttgggtccattcaatgccccttacgctatctctcaaactggttgggtcccaggaatcatcttgtacttcttcatgggtgccatcgctgcatacactggtttgatcttgtggagattgtacatcagattggactcaaacaggtaccccatcaggtcttacggtgacatcatgcacaggatctacggtactacagcaagaagaatcgcaaacgtcatgcagagcatccagttgatcatcgtagtcggcatcatctgtttggcaaacggacagtctgtgtcccaaatcgctaaggggcacatctgcttctcattggccatcatcatctgggctatcttcggttgcgttatcggacagatcagaacattgagaaactacggctggttggcaaacgtggctgtttggatcaacttgttgatcatcttcactgctatgggcttcgtgtctcattcacctccgaacttctctgcagctcaatccagcttgggtgtctcacccggtccagtcgttacagagaagttcgcaaaggttcctttgttcgaccaagtaaacggcatcatgaacatggtgtacgcttatggtggtgccatgatcttccctgagatgttggcagagatgaggaggccgatggacttctggaagggaatggttatggctcaaatgttgatcttctctgcttacttgttgtttggcgctttcgtctactcacaacagggtcaattctcattgccattggcttaccaaggcgtctcaaagtacgcctggcaaaccatcggtaacgctttgtccttgatcaccggaatcatcgcagccggattgtacgggaacatcggcatcaaggtagtttaccataacatcatcgttgactggttccatggtcctccgttgatgtcaatgaagggtagaatcatctggagtttcttggtgttgatctactggtctttggctttcgtcttggggtctgcaatccctcaggtcaacaccatcaacggtttggtaggtgcagcaggaatcatgcaattcacttacactttccctccgatgttgagattcggttacgacgtaatcaccgacgctatggctggagacggcacttacgaccctttgacaaaccaaccttacagagtagacacctggagagactggtccagatggaagaggggattgttctctggtagatggtacttcaagttgttgaacttcggtatgacattggctgccatcgccatggcagctttgggtttgtgggctgctggggaggctgcaaagcagaccttcgctttccagggtgctgccacatccttcggttgtactgcaccagtctaa

SEQ ID NO: 360 - DNA, 1710 bp, Mortierella sossauensis
atgagtaaggagttccctggagtcatcgagttgcatggagagtctggaaagcatgagatcgagttgatgaacgaggtgcctggacaccatcacaccagttacaccgacatcaaggacgtcccattcgaggagttcttgcattacagtttgatccagagaactagggaggagcaggaagccggagctttgaaggacggattgtccaacccgttcggcaagtacgcaaacaccaagttgccaattgccgcagtcactggagtcgagactccggaggcagagatgacgccagacgagttggagcgtagtaacgcacgtagggcattgagacaagccggatgggctgctgtcttcttcttgatcactaccgacatcttgggaccgttcaacgctccagtcgcaatctcccaattgggttacgtcccaggagtattgttgtacgtcttcttcggaatcttcgctttgtactgcggattgttgttgtggagattgttcatccacttggacagtgaccaatacccagtcaagacttacgccgacatcgcagagagaatcttcggtagatccgctcgtcacgtatgcaccgttttgcagagtttgcagttgatcgtcaacgtcggagtgatctgcttgagtaacggacaaagcttggcacagatcgtcgcaggtcaaaacaacaccggatacatctgtttcagtttggcaatcgtcatctgggccttgttcggtatggtcatcggacaaatcagaaccttgaagaacttcagtttcttggcaaacttcgcagtatggttgaacttgttgatcatcttcaccagtatgggattcgtagcccatagtccaccaaactacgctgcagctttgatccagatgggagtcccattcggtcccgtcgagactcataacttcgtcccattgccgacgactaccaagatcaacggtatcatgcaaatggtcttcgcatacggaggtgcaatgatcttcccagagatcatggcagagatgagaagacctatggacttctggaagggtatggctatggcccaaactttgatcttcatcgcctacttgatgtacggaatcttcgtctacgcattccaaggacaattcacgttgccattggcttaccagggagtctctaagtactcctggcaaacattgggtaacgtcttggccttgatcacaggtatcatcgctgccggattgtacggaaacatcggaatcaaggtcgcatacatcaacatcgtcgaggactggttcaagggtcctagtttgttgagtcgtaagggacatgtcatctgggcaatcatggtcgtagtatactggggattggcatacatcgtcggatccgctatccctcaagtcgagaacatcagttccttgatcgcagccatctgtatcatgcaattcagttacacctttcccccaatcttgagggtaggttacgacgtcatcaccgacgccatggcagaggactccgtatacgttccaggacaaggtgtctccggaagggtagacacatggaaggacagatccaggtggaacagaggattgttcaccggaagggtctggttcaaggctttcaacttcttgttgttcatcggtttcaccatcatggcagccttgggaatgtggggtagtggagttaacatcaaggctgctttccaaatccaaggcgctgctaccagtttcggttgcacagctccagtctaa

SEQ ID NO: 361 - DNA, 1740 bp, Mortierella longigemmata
atggctaagcagttccctggaaagatcgagttggacaacgagatcatcatgagtgagatgaaggacgtctcaagtcacgacaacacgcatcacaccagttacaccgacatcagtgacgtcccattcgaggagttcttgcattacagtttgatccagagaactcaagaggagcacgctgccgcaaacttgcagaagggagacgagagtgagagttcttcctccccatccagtatccgtaacccattcggaagatgggcaaacaccagattgcctttggcagacgttacctctttcgacgctacaaccgccaacatgactgcagaccaattggagagagcaaacgctagaagggctttgagacaggctgggtgggctgctgtgttctacttgatcactaccgacatcttgggacccttcaacgctccaatcgccatcgctcaattgggatacgtaccgggaatcatcttgtacacggtaatgggaatcgctgcattctactgtggaatcttgttgtggagattgttcatccatttggacagtgaccagtacccagtaaagacctacagtgacatctgcgagagaatcttcggaagaacagccagacatgtctgtaccttcttgcaatcattgcaattgatcgtcaacgttggagtaatctgtttgagtaacggacaatccttggcacaaatcgtagctggaaactctggaaccggatacatctgtttctctttggcaatcgtaatctgggctttgttcggaatggtcatcggacaaatcagaaccttgcacaacttcagtgtcttggccaacttcagtgtatgggtcaacttgttgatcatcttcactagtatgggattcatcgccaacagtcctccaaactatgctgccgcattgtccagtatgggagtcccaatgggaccggtcgtcacacacttgttcgtcccattgcctactactacccaaatcaacggaatcatgcagatggtcttcgcatacggaggagctatgatcttcccagagatcatggcagagatgaggcgtccaatggacttctggaagggcatggcttgtgcacaaagtttgatcttcgtagcctacttggtatacggggtgttcgtatacagtttccaaggacagttcacgttgcctttggcctaccagggagtcagtcgttactcctggcagactgtaggaaacgtcttggcattgatctccggaatcatcgctgcaggcttgtacggaaacatcggaatcaaggtagcctacgtcaacatcgtcgaggactggttccatggaccgcctttgttgagtaggaagggacacgtcatctgggctgttatggtcgtagtctactgggcattggcttacatcgtcggaagtgccgtcccgcaagtcgagaacatcagtagtttgatcgcagccatctgtatcatgcaattcagttacaccttccctcctgccttgaggttgggatacgacgtaatcaccgacgcaatgagtgaggacgcagtatacatcccaggacatggaactgccggaagaatcgacacctggaaggactccagtcgttggcgtagaggaatcttgaccggaagagtatggttcaaggctttgaacttggtattggctgtcggattcttggttatggctggattgggaatgtggggaagtggtatcagtatccaacaagcattcgaggtcagtagtgctacaagtttcagttgtacggctccagtctaa

SEQ ID NO: 362 - DNA, 1644 bp, Calocera viscosa
atggctagtgcctctcctaccaaccatgtcttggaggaccacgagtccaagacccccagtaagcataccatccaagaggagaagaaccaatacacccataccgtagtcaatcccgctgctttgttccctacgttcttgaagttggctgctcagcagagagagagggagcgtgtaggaatcagtgctaccgagcctgagaagggagcaatcggagacgactccttgttgcaaggattggacccacacgagcaagagttgttgaccgctcgtagggcattgagaacggcttcttgggctgctgtattctacttgatcactaccgacatcttgggtccattcaacgctgcattcgctatcagtcaggtcgggtacgtcccaggcgtcatcttgtacttcgtcatgggagctgtcgcctgctacaccggattgttgttgtggtacttgttctgtaggttggacagtgacaggttcccggtaagaacttacggagacttggcccaaactatctacggaccatgggctcgtcatatgtgcaccgtcttgcagagtatccaattgatcatcaacgttggtactatctgtttgagtaacggacagtccttgagtcaaatcgtcattgggggaggtggacaattgtgtttcagcgtttgcatcgtattgtgggccatcgtcggaatgatcatcggacaaatcagaacattgaagaacttcggatggttggcaaatgccgctgtctacttgaacttgttgatcatcttcatcagtatgggattcttcgctcatagtccacccaactacgcagcagccgtcgctagttacggaccagtaatcgctagtggacctgtaagtaccgcagctttcgtagaccaagtattgtacaacaaggttaacggaatcatgaacatggtcttcgcctatggcggagctatgatcttccctgagttcatggcagagatgagaagacctatggacttctggaagggaatgtgctgtgcacaagctttgatcttcacttgttacatgttgtacggagtcttcgtttacgcataccagggacaatacaccttggctatcgcttaccaaggagtctccacatacgcttggcaaacggtgaacaacgtcatcggtttggtctctggaatcatcgcagctggattgtacggaaacatcgccatcaagatcgcatacatcaacatcgtcgagcaatggttcaagggtccaccattgatctcaaagaacggacatatcatctgggctggaatggtattgttgtactggtctttggcattcatcgtcggctccgccatcccacaggtacaaacaatcagtggattggttgctgctgtatgtatcatgcaattcacctacaccttccctccagccttggtgttgggataccaagtcttggcagacggatacggacataaccaagagggagtagtcttggctggatccttctcattgaggagaggattcttggcaggtaactggaagaggaagttgttcaagttgagtaacttcttgttgttcttggccagtgctgctttggcttgtttgggaatgtacggcagtggtaccgcaatcgcagctgtcttccaggtatctgctgctacctccttcggatgtgctagtcctgtcgcttaa

SEQ ID NO: 363 - DNA, 1707 bp, Fomitopsis palustris
atgtacaacaacgccaacttggagggtgaccccaggttggagttggaggagaacggcagagacttcttggagcctgccagagacgcccatggcacatacttgcctactttgaaccaaccatgtcaacctgccagaacggttatcacaagagccttggctggcgtaagaccgagtttcgaggagtacttggctgcagctgagaggcaacgtgcttatgaggaggctagacataagggggagttgagctccactgcagacacagcttctgccgacggttcatctcacaacgagaagccaacaaagggtgcctcacccgtcgtctctgaggcagccttgactgctgaggagaaggagagaatcaacgctcgtagagctttgcgttctgcttcttgggctgcagttttctacttgatcacgacagacatcttgggtccattcaacgcaccatacgcaatctctcaagtcggatatgcccctggagtaatcttgtacttcgtgatgggcgttatggcttgttacactgggttgttgttgtggtggttgttcttgaagttggactcagactctttcccggtaaagacatattcagacttgatggagagaatcttcggtagagcaagcagacacgtagctgctgttttgcagagtttgcagttgatcatcaacgttggtacaatctgtttgtcaaacggccaaagtttgagccaaatcacaaagggtcatttgtgcttcgcagtctgcatcgttatctgggcattggttggtatggttatcggtcaaatcaggacgttgaagtcttacggttggttggcaaactccgctgtttggatcaacttggctatcatcttcatctccatgggtttcgtatcacactctccaccaaactatgagggagcaaaagccgcatacggtgtattgccaggtccagtgcagacggcagcattcgtctcccaaacattgccaaacaaggtaaacggcatcatgaacatggtcttcgcttacggtggtgctatgatcttcccagagatgttggctgagatgagaaggccttgggacttctggaagggtatgtgttgtgctcaattgttgatcttcgtcgcctatttgttgtatggtttgttcgtctattcttaccagggccagttcacattgagtatcgcctaccaaggtgtgtctaagtatggctggcagactgtgggtaacgtaatgggtttgatcactggtatcattgctgccggtttgtacgggaacatcggtatcaaggtagcctactatgctatcatcgaggacatgttcaacggtccaccgttgaccagtcataagggtagattcatctggtctggtatggttttgttgtactgggctttggcattcatcgttggcgcagccatcccacaagttcaaacaatctccggtttggtagctgctgtttgcatcatgcaattcacttacacatttccgccagcattgatcttcggattctatttcttgaaggacggtagggaccctgtatcaggcgctttgtcttggagagccggtttcttcggaggttctgctcctagggttttgttcaaggttttcaacttcttcttggctttggctgccttgtcaatggcagccttgggtatgtacggctcaggtacggcaatcaagttgactttccaaacttcacaggctacttctttcggttgctctgccccagtttaa

SEQ ID NO: 364 - DNA, 1623 bp, Antrodia heteromorpha
atgtacaacaatgccggagtagagggtgaccccaggttggagaaggaggagaacggcagagacttcttggagcctcaggcagctagctacaggcatgctacattcgaggagtacttggctgctgcagagcgtcaacgtgcttacgaggacgcccaccataagggagagcacaccccagactcagcttcaaccaacggttctacccaaaacgagaagaccggaaagggagcagtagcctctgaagccgcattgaccgcagctgagaaggagaggatcaacgctcgtagagccttgagatcagcctcatgggcagccgtattctacttgatcacgacagacatcttgggtcctttcaacgctcccttcgccatctcacaagtgggttacgttccaggtgtaatcttgtacttcttcatgggtgctatcgcctgctacacaggattgttgttgtggtggttgttcttgaagttggactccgacgtctacccagtcaagagttacagtgacttgatggagagagttttcggaagagccactagacatatgtcatcaatcttgcaatccatccagttgatcatcaacgtgggtaccatctgcttgtcaaacggtcaatctttgagccaaatcaccaagggtaagttgtgcttcgcagtctgcatcgtaatctggactttcgtaggtatgatcatcggccaaatcaggacgttgaagaactatggttggttggccaactcagcagtctggatcaacttgttgatcatcttcatctctatgggtttcatcgcacacagtccaccaaactttgccgcagctttggcatctttcggcatcccacaaggtcctgtccaaactgcaactttcgtcagtcaaaccttgccaaacaagatcaacggaatcatgaacatggttttcgcctatgggggtgctatgatcttccctgagatgttggcagagatgagaagaccttgggacttctggaagggtatggtctgtgcacaagctttgatcttcgtcgcttacttgatgtacggtttgttcgtgtactccttccagggtcagtatacattgtctatcgcttaccaaggtgtttccaagtacggttggcaaacggtgggtaacgttatgggcttgatcaccggcatcatcgcagctggcttgtacggaaacatcgggatcaagatcgcatactacgctatcgttgaggacatgttcggaggtccatcattgttgagcaagagaggtcaattcatctggactggaatgaccttgttgtattggagcttggcattcatcattggggcagccatcccacaggtccaaacgatctcaggattggtggctgctgtctgtatcatgcaattcacttacacattccctccagccttgatcttcggttactacttcttggcagacggtagggacccagctactggaacattgtcttggtctagaggattcttcgctggatctttgggcagaaaggccttcaagttgttcaacttcgttttggcatgggctgctttgtctatggcatgcttgggtatgtacggttctggtacagcaatcgccttgacgttcaagtcttcccaagctactagtttcgggtgtgctcctcctgtctaa

SEQ ID NO: 365 - DNA, 1617 bp, Postia placenta
atgttcaacgacgcctccatgggtggtgaccccaggttggagagggaggagaacggccatgacttcttggagcctgtgcatgatcaccatggcaaggttagtttcgaggagtacttggctgctgcaaggcgtcaacgtgctttcgaggaggcccagcataggggagagtcacccgctagcgacactgcttcctccagtacaaacgagaagagttctaagggagctgaggtaagtgaggctgctttgacagcagacgagaaggagagaatcaacgcaagaagagccttgcgttccgctagttgggctgccgtattctacttgatcactacagacatcttgggtccattcaacgctccatacgcaatcagccaagttggttacgttccaggtgttatcttgtacttcatcatgggcgtggttgcttgttacaccggtttgttgttgtggtggttgttcttgaagttggactccgacacattccctgttaagacatacgccgacttgactgagagaatctacggtcgtacagctcgtcatatcgtatccatcttgcaatccttgcaattgatcatcaacgtcggtacgatctgcttgagtaacggtcaaagtttgagtcaaatcgctaagggcaacttgtgtttcgccgtgtgcatcgtcatctgggccatcgttggaatgttcatcggtcaaatcagaaccttgaaggcttacggatggttggcaaactctgctgtatggatcaacttggctatcatcttcatcagtatgggtttcatcgctcatagtccacccaactacagtgcagccgagagtgcttacggtatcggcatcgagcctatcgtaaagagtactttcgttagtttgcctatcgcaagtaaggtaaacggcatcatgaacatggtcttcgcttatggtggtgccatgatcttccctgagatgttggctgagatgagaagaccttgggacttctggaagggcatgtgttgtgcccaattgttgatcttcgtagcttacttgttgtacggtttgttcgtttactcttaccaaggtcagtacactttgggtatcgcttaccaaggtgttagtaagtactcctggcaaaccgtagggaacgttttgggtttggtgactggtatcattgccgcaggattgtacggtaacatcggtatcaagatcgcctactacaacatcgttgaggacatgttgggtggtcctagtttgatgagtaggactggccatatcatctgggttggtatggtattcttgtactgggccttggccttcatcgttggtgctgccatcccccaggttcagaccatctctggtttggtcgctgccatctgtatcatgcaattcacatacactttccctccagcattgatcttcgggtactacttcttgaagcatggaagggactcctccactggtaagatcaactggaagagaggtttcttcggtggggagacaaagatgttgttgttcaagactttcaacttcttcttggcttgggcagctttggctatggcttgtttgggcatgtacggttccggtactgctatccaggagacgttccagactggagctgcaactagtttcggctgcactccacctgtataa

SEQ ID NO: 366 - DNA, 1647 bp, Sparassis crispa
atggctacctctatcggaaacttggagggtgaccctagaatcgtggacaagcaagaggacgggcatgacttcttggagcctacccacccaaggatgggtagtttgttgccacgtttcagacataggttgacgccaacgttggacgctaaggtgacgttggaggagtactgtgcccatgccgtaagacaaaggaagttcgagatggaagggccatctactttgagtcctagtagttcaaacatcggggagaagaacgagaagttcccagacatcagtgtagaggccaacttgactgaggacgagaaggagagaatcaacgcaagaagagcattgagaaccgctagtgcaactgttttctacttgatcacgaccgacatcttgggtccattcaacgctcctttcgcaatcagtcaggtgggttacgttccaggcgttatcttgtacttcttcatgggtgctatcgcatgctacacgggattgttgttgtggtggttgttcttgaagttggacagtgacatcttcccggtaaagacgtacagtgacatcgcagagagaatcttcggaaaagctgccaagcacatctgcaccatcttgcagacaatccaattgatcatcaacgtgggtacaatctgtttgagtaacgggcagtccttgtcccaaatgtctaagggtaggttgtgtttcgctgtttgcatcgtcatctgggctatcgtcgggatgttgatcggccaaatcagaactttgaagaacttcggatggttggcaaactgtgctgtttggttgaacttgttgatcatcttcaccagcatgggtttcgtcgctcatagtccgccaaactacgcagcagctttggcaagtttgggcgtccctgagggtccaatcgtccacgcaactttcgtatccgcaccattgtacaacaaggttaacgggatcatgcagatggttttcgcatacggaggagctatgatcttcccggagatgttggctgagatgagaagaccatgggacttctggaagggcatgtgttgcgctcaattgttgatcttcgctgcctacttgatgtacggtgttttcgtttacgcttaccaaggacagttcaccttgcctttggcctaccagggtgtttctaagtactcttggcagactttgaacaacaccttcggattgatcacgggtatcatcgcagcaggcttgtacggtaacatcggtatcaaggttgcttactacaacatcgtggagggtatgttgcatggtccacaattgatgagtcgtacgggtcgtttcatctggaccggtatggtattgttgtactgggcattggccttcatcgtcggtgccgctatccctcaagtagcaaccatcagtgctttggttgcagctgtctgtatcatgcaattcacctacagtttccctccagcattgatctgtggtttctacttcttgaaggacgcaaggggtgagaccggaagaatgtggtggtaccgtggtttgttctccggttactggtggttcaagtggttcaacttgatcttgtctttggctagtttcagtatggctggtttgggtatgtacgggagtggattggcaatcaaggctacattcaagttgggtgcagcaacatccttcggttgtactcctccagtgtaa

SEQ ID NO: 367 - DNA, 1656 bp, Solicoccozyma terricola
atggcttcattcgccaacatcgctggtgaggcagacccacgtgtgcctttgccagactcaaagatccaacagaagagcaacgacgacttgaccatcgttgagcctgcttatcccggtgcttcattgatcgggagacaggctagattgcatgacatgatgtgctacgcacagcagcaacgtcaaatcgagaacggatctccaggcgatgccggttaccctatcccagcaatggtagagaagcatatcacaagacaacctttgcctccaccggagaacgcagttgacgttttggagttgacacccgaccaggcagagagggcaaacgctagacgtgctttgaagcaagcatcctgggctgctatcttcttcttgatcactacggacatcttgggtccattcaacgcaccatacgccatctctcaagttggctacgctccaggagtaatcttgtacttcttcatgggattgatcgccttctacaccggttgtatcttggcctacttgtactgtaagttggactcagacaagtacccggttttgacatactcagacatcggcgagagagtttgcgggtccgcaatgcgtcatatctgtacggtcttgcaatctgttcaattggtggttaacgtcggtacattgatcttgagtaacgcacaatcattgagtcaaatctccatgggtaagttgtgtttcgttgtcggattggttatctggatggctgtaggcatgttcgtaggacaaatcagatctttgaagaactactcatggatcgcaaacttcgcagtctggttcaacttgttgatcatcttcacttctatgggtttcgtcgccaactctccaccaaactacgctgcagctcaagccgcatacggagacgctatcggcagtggtcctgtcatgaccgcagctttcgtcagccagccattggctcctaaggtcaacggtatcatgaacatggtattcgcatatggtggtgccatgatcttccccgagttgatgtcagagatgagaaggccaatggacttctggaagggtatggcctgtgcacaattgttgatcttcgttgcttacttgttgtacggtttgttcatctactcattccaaggtcagtacactttgccattggcctaccaaggcgtgagcaagtactcttggcaaaccgtaggtaacgtgttggccatgatcaccggcttgatcgctgccggattgtacggaaacatcggtatcaaggtggcctaccataacatcgttgagggttggttcaacggtccaccgatcatgtcaaagaagggtagatacgtatggagcgttatggtcatcgtgtactgggcattggccttcgtaatcggtgcagcaatcccacaaatccaaactatctctggcttgatcgctgctgtttgtatcatgcaattctcttacaccttcccaccattgttcttgttcatgttcttggtaagacgtgacacattgttggctggaggaagctggaaggtaggcttgtggggtaggggatggttcttgaagtggttcaacttcactttgttcttgggtgctttgtcaatggctgccttggggatgtacggttccggtatctctatcaggacgactttcatgacagcccaagctacttcattcggttgtgtgcctcccgtataa

SEQ ID NO: 368 - DNA, 1845 bp, Erythrobasidium yunnanense
atggctgttaatgccgcaaacttggctggttccgagccaatcgaccctatcggtgccgagcgtggtcaatatgcagagaaccatccgagacagttcactgcagcacaaagattgaagccaactttctccgagtaccgttactgggcagacttgaagagacagagtgagcgtgacggtacgtcaggtaacggcgtagacgctgagggaaacgagtatgagagaccaaacatcttcaagttgatcaagaacggtggaaggatcgctccacgtcctacagcagcagacggtcacaggaagtcacccacattgttcttgccagacgacgctcatcaggctatcgacggtgagaaggacaagaagagggagccgaacatcgacatcactgttactactttgagaagaggacaagagtacgacggtttgacagaggacgaggctgagagattgactgcacagagagctttgaggattgccggatggaccactatcacatacttgatcaccacagacatcttgggtccattcaacgctccgtacgctatcgcaaacatgggaatggttcctggtgtgtgctgctacttcttcttcggcgtcatcgcctctatctctgcttacttcatcggtttcttgtacaacagattggactccgacaggtaccctatccgtacttacggagacatctgtgagagattggttggcaagccgttgagatacttcgctacaatcttgcaatcaatccaattgatcgttaacgtcggtatcatctgtttgtcaaacggtcaatccttgtaccaagttgcaaaggggaacttgtgtttctctgtttgcgtgttgatcatggcattggctggtatgttgatcggccagatcaggtctttgagaaacttcggtgtaatcggtcagatgtcagttttcttgaacttcttgatcatcttcgtatcattgggagtcgtttgtaacacaggtcccaactatgccgtggcaaatgccgcagactctactttgggtgacggaccagtagttgttaaggctttcaactccggtagtatcgaggctcaaatcaacggtatgttcaacatcgttttcgcttatggcggtgctatgatcttcccggagatgatctctgagatgagaaggcccatggacttctggaagggtatgttcttggcagacactatcatcaccatcgcctacatggtttatggaatcgtttggtacactcaacaaggacagtacacacaagcacagtcttacttcggattggtaccttattggtctcagacattctgtaacatcttggcaatcatcactggcttgattgccgcttgtttgtacggcaacatcggagttaaggtcatctacatcaacgtcttccaagacttgttggggttcccaccattgaacacaagaaagggtaggatctgttggactgcattcatcccatgttactgggcaatcgccttcgtcatcggttccagtgtaccggctttgggagcaatgaccggtttggtaggtgccgtttgtatcttccaattcacttacactttcccaccattgttgatgttgtgctaccacttgaagacagacgctggtaaggaggacgagcatttctcaggatacggaactaagtggaccccttctgagtcatggaagtctatggctagatggacacgtgcttggttcggtggtggcatgttgtctttcggttggaagatcgtcatgttgtgctacttcttggcatgtttggcaacagtagctatgggtatgtacggtacaggcgagagcgttaagtctgctttcgaggtcggccaagcaacctctttcggctgtaaggcaaacgcctaa

SEQ ID NO: 369 - DNA, 1755 bp, Piloderma croceum
atggctttcgtttctcctgcaaacatcgctggaagggacccgttggagccaatggccgactcaaacgagaagatggacttcatcgagccatcccatggattcgcaagtgacggtcataagccaactatcgccgagtacatgtactacgctaagatcaagagggacgcagagaggggagggttcagtggaaacggagcagacgcacaaggtaccaacatcgcaagacctagtttgtggcaaatgttgaggcatggaggaggaagacatatgactaccgagcatttggacaagggattgatcacagctatgaaggacgcacatgctgaggagacagtcggattgagtgagatcgaggtcgagaagttgaacgcaagaagaatgttgagagtcgctggatggagtactgtcttctacttgttgactaccgacatcttgggacctttcaacgctccttacgctatctccttgttgggcttggtacctggagtcttgttgtacttcttcttcggaatcatcgctgctacgactggattgatcttgtcctacttgtacaacatgttggacagtgaccgttaccccgtccgtacctacggagacttggctgagagagtcggaggaacgttgttgaggcatgcttgtagtatcttgcagtccatccaattggttgtcaacgtaggaatcatctgtttgtccagtggtcaatctttgtaccaagtgagtaagggtaagttgtgtttctccgtttgtgtcgtcgtatgggctttggctggaatgatcgtcggacagatccgtagtttgagaaacttcggaatcatcggaggattctccgtttacttgaacttgttgatcatcttcatcagtatgggagtcgtagctcattccttgcccaactacgcagtcgccaacgctgcagacgacacgttgggaaacggaccggtaatcgtcaacgcattcaacaaccaaaacttggtaggtcaggtaaacggaatgttcaacatggtcttcgcttacggaggagccatgatcttcccagagatgatggctgagatgcgtagaccaatggacttctacaagggaatggcttgtgctcaaatcttgatcttcgtcgtgtacttgatgtacggaatcttctggtactgcttccagggacaatacagtcagccaaacagtttccaaggtttgtcccctttcgcttggcaaacgacttgtaacgtattgaacatggtctccggcatgatcgctgcaacgttgtacggaaacatcggaatcaaggttatctacatcaacatcgtcgaggacatgttcaagggaccctccttggttagtagaaagggacgtatcttgtggaccttcttggtcccagtctactgggctttggctttcgtcgtgggaagtgctgtcccagctttgggagctatgacaggattgatcggagcagtatgtatcttccaattcacctacaccttgcctccattgttctggttcttgttcgagttgaagaaggacgcagcattggaggacgagaagttcactggtcatggaagtaacccaagagctgtcgacacctggagagacggatccagatggagaagaggaatcttcacaggaagatggtacgtaaagatcttcatgttcgtcatcttcttggctgcattggcttgtgcaggattgggtttgtggggaaccggagaggccgttaaggctaccttcttgcatggacaagcaacgagtttcggatgcttggcaaacgcttaa

SEQ ID NO: 370 - DNA, 1725 bp, Rhizopogon vinicolor
atggctttccaaccggcagcaatcgaggctggccatgacccgagggtacatcatcccgagaaggaggagcaggcagcctacacctacgaggacaacgttttgccagacggttctaccccaaacatcgagacgtacatgtactacgctaagatccagagagacaaggaagctgccttgagcgcaaaggaggacgcagagagaggcagagggagtttgatctccagagcattcaagcgtagtagagagttcgacggagacagtatcacctctgcacatagtggtgagaagacagtagctgcttccgaggaggacggctcctccgctgttgtcacagagtacgagtacagagcagctagtagtgcattgcgtaccgctacctggggtagtgttttctacttgatcactaccgacatcttgggtccatactccactccatacgcattccaacaagtagggtacggtcctggagtagcctgtttcttcgttttgggaatcatggctgcatacagtagtttcatcttgtggtggttgttcttgaagttggacagtgagaagttcccagtcagatccttcggagagttgggccaaaggatctacggcagatggttcagacatgtctgcaacatcttgcaaagtgttcaattggtgttcaacgtaggtttgatcatcttgggaaacggtcaaggtttgtcccaaatggcaaagttcagattgtgcttctccgtatgcaacgtcgtctggacattggctggtatgatcttgggtcaaatcagaaccttgcaaaagttcggcagtatcgcaaacttggcaatctggttgaacatcttgacattgatcatgaccatggctagtgtcgcaaactcccctccaaactacaccgcatccacattgacctccccataccctccagttcagacatacgctatctacatccagcctttccaaaaccaattgaccggaatcatgcagatcgtgttctcctacggtggcgcaatgatcttcgttgagttcatggctgagatgagaaggccaatggacttctggaaggctatggcttactctcaattgttcatcttcatcgtttacatgttcttcggtttgttcgtctactcataccagggtcaatacgctatcaatccagccaaccaaggtatcagtgcctacggtttgcagaccgctaccaacgcaatcagtttgactgccggattgatcgcagctgctttgtacggaaacatcggtgttaagatcatctacaacaacatcttggtcgagttgttggggttccctgagttgaccacgaccagggggaagtactacttctccgctagtgtaatcgtgtactggtccatcgcattcgtcatcggtagtgcaatccctcaattcagttacatcagtagtttggttgctgcagtatgtatcttccaattcacctacaccttcccacctttcatgatcttggggtacttgatgcaagtagacgcaaacaagggtgacggcgagttcgacatcaagaaccccaacgctcatagagtagacacctggcatcaattgagtagatggaagagagggtggttcttcttcaacgtctggaacatcttgttgacattggcttgtttgtcctgcgctatcttgtccagttactcctccatcaaggctatcgttggagctttccagagtggtgctaccagttccttcgggtgtaagagtccattggacaacagttaa

SEQ ID NO: 371 - DNA, 1755 bp, Suillus brevipes
atggctttccaaccggcagtcgttgaggcttccagggacccgagggtatacttgtccgagaaggaggagcaggacgcctacgttccggagaactaccatatcccagacggtaccgttccaaacttggagacctacatgtactacgctaagatccagagagacagggaggccttgagtgccaagaacgacgccgagggtggtcactgggggagtttgatctccagagtcttcaaccgtagtcaagagtccgacgagaggagtgttgcttctgcacatagtgacgagaagaacgtagctccttccagtgaggacggctccggagctttggtcaccgctggtgagtacagagcagctagtggtgcattgcgtaccgctacctggggtaccgttttctacttgatcacaaccgacatcttgggtccattctccaccccatgggcattccaacaagtagggtacggtcctggagtagcctgtttcttcgttttcggaatcatggctgcatacagtggtttcttgttgtggtggatgttcttgaagttggacagtgagagatacccaatcaagtccttcggagacttgggccaaaggatctacggcaactggttcagacatgtctgccatatcttgcaaagtttgcaattggtgttcaacgtaggtttgatcatcttgaccaacggtcaaggtttgtcccaaatgtccaagttcaagttgtgcttctccgtatgcaacgtcgtctgggccttggctggtatgatcttgggtcaaatcagaaccttgcaaaagttcggcagtatcgcacatttgagtatctggttgaacgttgccatcttgatcatgaccatggctttcgtcgcaaactccttgccaaactacaacgcatccttgttgcctgtaggtcccgtcatcacccaggccatcaacttgcagcctttccaggaccaattgaacggtatcatgcaaatcgtattctcttatggcggtgctatgatcttcgttgagttcatggctgagatgaggagaccaatggacttctggaaggctatggcttacagtcaaatcttcatcttcgtcgtttacatgttgttcggagccttcgtctacacctaccagggtcagtacgttgtgaaccctgccaaccagggcatcagtgcctacggcttgcaaaccgctaccaacgccatctccttggcttccggtttgatcgctgctaccttgtacggtaacatcgggatcaaggttatctacaacaacatcttggtagagatcttcgacgctccgccattgaccgtcacccgtggaaagtactacttcgcaatctgcgtccctgtatactggagtatcgcatacatcatcggaagtgctatccctcaagtaagttccttgagcgctttggttgctgctttgtgtatcttccagttcagttacaccttccctcctttcatggttttgggatactgcatgcaattggacgccatcaagggggacagagagttcgacatcaacaacccagacgcccatagagttgacacctggagagacttgtccagatggaagagattgtgtacctactacttgtccttcgcaaactggaagaacgtattgttcaacgtctggaacttcgttgttgttttggcatgtttgtcctgcgcaatcttgagtagttacagtgccatcttggctatcgttaaggccttccaaagtagtacctctagtagtttctcctgccatagtccattggacaactccggttaa

SEQ ID NO: 372 - DNA, 1716 bp, Boletus edulis
atgtccttgagtttggcaacagttgaggaccacaacccacgtgtgcacatccaagagaacaacgacgttgtggcaccggagcatttcttgttggacgacggtttggctccaaacttcgagacttacttgttctacgcccaagagcaaagagacaaggaggcagcagaggccaggaaggagggacatttgcctcctactggttggttgagtgagttgttcggattgaacagattcacggacactgcctctgttgtatccgacgagaagaaggcagtctccgacgaggctgccacattgggtgtgtctccggcagagtacagggctgcttccagtgctttgagaactgcaacctggggtgctatcttctacttgatcactacggacatcttgggtccatactccgcaccatacgccttcgctcaagttggctacggtccaggagtcgcttgtttcgtggttttcggagtaatggctgcatactctggtgttttgttgtggcatatgtacttgaagttggactccgacaggttcccgttgaagtccttcggtgacttgggccatagaatcttcgggaactggttccgtatcgtatgtcacgtattgcaatccttgcaattgatcttcaacgtaggtttgatcatcttgggcaacggccaaggtttgtcacaagttgtaaagttcaggttgtgtttctccgtatgcaacatcgtttggatgatcggaggcatgatgttgggacaaatcagaactttgcaaaagttcggttgggttgcaaacttctccatctggttgaacatcatcacattggtcgttactatgggtgctgtagcccatacagctccaaactacactgcagctaaagccgcatacggagttgttgcaggtcccgtccaaaccttggccatcaaccaacagccgttccaaccacagttgaacggcatcatgcaaatcgttttctcctacggtggcgcaatgatcttcatcgagttcatggcagagatgagaagacctatggacttctggaaggcaatggcttgtgcccaagtattcatcacagttgtgtacatgttcttcggtttgttcgtttacacataccaaggtcaattcgtgatcaaccctgcaaaccagggtatctcattgtactcattgcaaaccgcaaccaacgttatcagcttggtagctggcttgatcgctgccgctttgtacggtaacatcggtgttaaggttatctaccagaacgttttgatggagttgttccatgcccctcctttgacggttaagtccggaaagtacttgttcgcagtaagtgttatcgtatactgggctttggcattcgtggttggttctgctgtccctcaattctccaacttgtccgcattggtagcagccgtctgtatcttccaattctcctacacttttcccccattcatgatcttgggctacttggttcaagtcgacgccatgtctgaggacaggccttacgacgttaacgaccccagaacctccaggatcgactcatggagaaacgtctctaggtggatcagaggatacaagaagcatttcatcttcaacacgtggaacttgatcatcttcttggcctgcttggctacagcagtcttggcatcctactccgcaatcactagtatcatcacagacttccaaacaggtacaagtggtacttccttctcctgccgtagtccattgcaaccagcctaa

SEQ ID NO: 373 - DNA, 1710 bp, Phlebopus portentosus
atggctttccaaccggcagcagttgagggtggccatgacccgagggtccatccttccgaggacggtgcttacgtaccggaccatccggttttgagtgacggtacctcaccaaacttggagacttacttgcactttgccgctcaacaaagagcccgtgaggaggcattggctggcactgaggtagagtcagccaggtggacttccttcttcttcggggacaagggtgcagagaaggcctctgttgtgagtgctgcagcatcagacgagaagaaggagaagtctgaggaaggcgcattgtcagtgtcagacgcagagtacagggctgctgcaagcgctttgagaactgcaagttggggttcagtcttctatttgatcactacggacatcttgggtccatactctgcaccattcgccttcgctcaagttggctacggtccaggagtagcttgtttcgtggttttcggagtcatggctgcatacagtggtgttttgttgtggcatatgttcatgaagttggactctgtggagtacccgttgaagagtttcggtgacttgggccaaagaatctatgggccttggttccgtcatttgtgtaacatcttgcaatctttgcaattgatcttcaacgtcggtatcatcatcttgggcaacggccaaggtttgtcccaaatggcacaattcaagttgtgtttctctgtctgcaacatcgtttggacgttggcaggcatgatcttgggacaagtgagaactttgagaagattcggttggatcgcaaactctgcaatctggttgaacatcatcacattgatcatcactatggctgctgtccgttacacagctccaaactacactgcagctgaagccgcatacaacgttccagcaggtcccgtacaaaccttggccatcaacacacagccgttcgagccacagttgaacggcatcatgcaaatcgttttctcatacggtggcagtatgatcttcatcgagttcttggcagagatgagaagacctatggacttcttgaaggcaatggcttgtgcccaagcattcatctgtttcgtgtacatgttcttcggtttgttcgtttacagttaccaaggtcaattcgtgatcaaccctgcaaaccagggtatctccttgtactccttgcaaaccgcaaccaacgctatcagcttggttgccgcattgatcgctgccgctttgtacggtaacatcggtgttaaggttgtatacaacacaatcttggtggagttgttcggagcccctcctatgacggttaagaagggaaagtacatcttcgcagtcagcgttgtcttgtactgggctatcgcattcgtgatcggtagtgctatccctcaattctcaaacatctctagtttgatcgcagccgtatgtatcttccaattcacatacacttttcccccattcatgtacttgggctacatgatgcaaatcgacgccttgagtgcagacaggccttacgacatcagaaacccccatggctcaagggtcgactcctggaaggacttgagtaggtggactagagcagtaaagaagcatttcgttttcaacttgtggaacttcgtaatcactttggcctgcttgtcatgtgcaatcttggcatcttacgctgcagtaaagtccatcgtgttggacttccaaacaggtacaagcggtacttctttcggttgccgtagcccattgcaataa

SEQ ID NO: 374 - DNA, 1677 bp, Pisolithus tinctorius
atggctttcaaaccggcagcaatccaaggtcacgacccacgtgtgcctatccctgagaaggacttgcatccggatcaccctatcttggcagacggaactgagccaaacttcgagacttacttgtactacgccaagcagcaaagagagaaggaagccgctgagtctaagagtgacgacatggagagaggtttctgggcaaacatcttgtggggtaagggagaccaaaagttgatgccgacaaacttcacagacgacaagaagggtaacacgaccggttccgctagtgaggccgagtacagagccgctagctccgccttgaggactgcttcctgggcttccgttttctacttgatcacaacagacatcttgggtccatacacgactccatgggctttctcccaagtcggttatggtccgggtgttgcttgcttcatcgctttcgcaatcatggcagcctactccggattgttgttgtggtacatgttcatgaagttggactccgacaagcatccattgagatccttcggagacttggcttacagaatctacggtggatggttcagacatgtgtgcaacgtcttgcagtccttgcaattgatcttgaacgttggtttgatcatcttgagtaacggtcaaggtttgagccagatggcaaagttcaagttgtgtttctctgtatgtaacgttgtttggatgttgggagggatgatgttggggcaaatcaggacgttgagaaagttcgggtgggttgcagacttcgctgtatggttgaacatcatcacattgatcatcactatgggagcagtggcacatactcctccaaactacgagggttccggtttgcctccaggtcctgttcaaaccttggcaatcaacaaccaacccttcgaggagcaattgaacggaatcatgcagatggtgttctcctatggtggggcaatgatcttcatcgagttcatggctgagatgaggcgtcccatggacttctggaaggcaatggctttcgctcaattgttcatcactactgtctacatgttcttcggtttgttcgtgtactcctaccaaggtcaattcgttgttaacatcgcaaaccagggtatctctttgtacagcttgcagactgctacgaacgcaacctcattgaccgcaggtttgattgccgcagctttgtacggtaacatcggcgtcaaggttatctacaacaccatcttcgtagagttgttcagagctccacccttgacagtaaagtccggtaagtacttgttcgctgtgagcgttatcgtatactgggcattggcctacatcatcggttcagcaatcccccaattcaccaacatctccgctttggttgcagcagtatgtatcttccaattctcttacacctttccgccattcatgttcttgggtttcgtcgttcagaacactgctttgtctggagacaagccttacgacgtaaacaacccaaggtcctccagggtagacacgtggagaaactggtccaggtggaggagggctttgtccaagcatgtattgttcaacttgtggaacttcatcttggtattggcttgcgttgccactgcagttttggctgcttactcagccatcaagtccatcgtaaacgcattccatacttctggtgctcccacaagtttcggttgtaagtccccagtacagtaa

SEQ ID NO: 375 - DNA, 1764 bp, Serpula lacrymans
atggctttcgtgcagcctgcagctatcgatggcggattggaccccagggttcatttgtcagagaaggagcaggtagccatcattggtccacccttggaggacgcatcaccagacggtactgttccaaacttcgagacgtacttgtactacgcccagatccagagggagcaggagagaaacgactcaagacccgcacatgaggtcgaggagagacactgggcaggtttgttctcacgtgctatcaagcctccaccttccgacaaggctagcatcgcatcagctacggacgagaagagagagccctcagaggagaacgcagtatacatctcaaagcaagagaagagaaacgcatcaggtgctttgagaacggcaacttggagctctgttttctacttgatcactacagacatcttgggtccatactcagctccctgggctttcgcacaagttggatatggtccaggagtcgcatgcttcttcgtcttcggtgtcatggctgcttacggtggtttcttgttgtggtggatgttcttgcatttggacagtgagagataccctttgagaactttcggggacttggcacacagaatcttcggcaagtacgcaagattggtttgtaacatcttgcagtcattgcaattgatcttcaacgtcggattgatcatcttgggtaacggacaaggattgtctcagatggccaagttcaagttgtgtttcgttgtatgcaacgttgtatggaccttggctggtatgatcttcggtcaaatcagaactttgcaaaagttcgggtggatcgcaaacttgagcatctggatgaacatcatcgtcttgatcatgacaatgggtgctgttcctcatatggctccaaactacactgctacagtcgccaactacgtcgctggcgcagttgaacctccggtgcaaactttggcaatcttccaacaagcattccaaacacaattgacaggcatcatgcagatcgttttcagttacggtggtgctatgatcttcatcgagttcatggctgagatgagaaggccctgggacttctggaaggctatgacagtaggtcaaggtttcatcttcgttgtatacatgttcttcggtttgttcgtttactcttaccagggtcaatacaccgtgaaccctgcaaaccaaggcatctcagcttatggtttgcagaccgcaaccaacgccgttagcttgactgctggattgatcgctgctgcattgtacggtaacatcggggttaaggttatctacaacaacatcggggttgccttgttcaaggctccaccgttgaccgtgccaaggggcaagatgatcttcgcaatcagtgttgtagtctactggtcaatcgctttcgttatcggttccgctgtccctcagttctcaaacatctctgctttgatcgctgcagtctgtatcttccaattcagttacacattccctcctttgttgatgttgggtttcaccatgcaatatgacgctgtaaagggtgacgagcaattcgaccccaacaacccagacgcagcctgtagagttgactcatggagacaattgtctcgttggcgtagagcattgtcctctccaactagtttgcgtttctggttcaagatgtggaacttcttgttgacattggcctgtttcgcatgtgctggtttgtcttcatattctgctatcgaggctatccagttgggtttccaaacagggtcagcttctacaagcttctcttgtcaatccccagtagacaagtctggataa

SEQ ID NO: 376 - DNA, 1719 bp, Coniophora arida
atggcttacgttgcccctgcagctatcgaccaggcatacgaccccaggtctcatttgacagagcatgagcaggacgacgcaattgccccacacccagaccatttcccagacggcactccaatcaacttggagacttacatgtactgggctaagttgagaagggaggaggagaaggcagacacagacgttggccctagaaacccctggttggacttcttctccactaagaagtcaactccaccaatcgaggactcccattcagactctccgtccgacgagaagcgtgagaagggatcagacaccgctagcgcagtgatctccccaagagagtacagaaacgcttctggtgcattgagaactgcatcttggggttcagttttctacttgatcactacagacatcttgggtccatacagcactccatacgccttctctgctgtaggatacggtcctggggttgctacattcttggggttcggattgatggctgcatacagtggtgcatgtttgtggtggatgttcatgaaggttgactctactaagtaccctgctagaaccttcggagacttggggtacaggttgttgggtaacggattcaggcatttgtgttctatcttgcagtctttgcagttgatcttcaacgtgggcatcatcatcttgggaaacggtcaaggattgtcacaaatggctaagttccagttgtgcttctctgtctgcaacttggtctggatgttgggaggaatgatcttgggtcaagttagaacattgactaagttcggttggttggccagtttgtctatctggatgaacatcttggtcttgatcatgacgatggcttcagtagcacattcacctccaaactacgcagcaaccttggttcctcaaggccctgtcgtcacaatggcaatcaacaggcagccgttcgaggcccagttgaacggaatcatgcaaatcgtattctcatatggtggtgccatgatcttcactgagttcatgtctgagatgagaagacctatggacttctggaaggctatggcatacgctcaagtattcatcactttcgtttacatgttcttcggtatcttcgtttacagttaccaaggacaattcacggcaaacccagcaaaccaaggtatcagtgcctacggattgcagacagccacaaacgctatctctttgaccgcaggattgattgccgctgccttgtacggtaacatcggtgttaagatcatctaccaaaacatcttgatcaacttgttcaagttccctccgcaccatagcccaaagggtaagtggatcttcgccgtgtctgtcttggtatactggtcattggctttcgttatcggatctgcaatccctcaattcacaaacatctcctctttgattgccgctgcttgtatcttccaattcacctacaccttcccagctttgatgatcttggctttcgctatgcaagtagacgctatcgagggtgacagagagtacgacccagcaaacccacacgcttccagggttgactcttggagagacttcagtagatggaagagggctttgaagaagaacttcgtgttcaagttgttcaacttcttggttttcttggcctgcttggctgcagtaggcttggctatgtactcctcaatcacggcaatccaagctggtttcgcagcagacgggtctgctacttctttcggctgccactctccagttgacaactcataa

SEQ ID NO: 377 - DNA, 1758 bp, Fibularhizoctonia sp
atggctttagtgaacaacgcatctagagctccctccggtcgtgaccctagatcaaccgatttgactgaaaagcaagaggaacaagccttaccccctgttgataccactttgcccaatggtgctcaacctccgtttgaggccttcttacattacgccagaatacaaagagctgccgaactggcagatactagggcaggttctgtcgcagaggaacagcactggggtggcttgattcgtagagctttcggaggtaggaagaagattcaagccgtcccttcagatgcctctagttcctgtgaaggcgtagagggagagaaaggagagaaaacatacttggaagctgaagcatcctcagtcaatagtggtgacgtagcctataagactttaagagttgcttcctggcaatctgttttctacttgattacaaccgacgttttaggaccttattctgcaccgtattcttttgcacaagtgggatattggccaggttgtatcatgtttttcgtttttggttgtttggctgcctttactgggtatttgttaatgtatatgtatggcgctttagatagtccgcaataccctgtgagacactttggcgacttggcagataggattttcgggagatgggcaaaacatgtttgtaacatcctacagtccttacaattgatctttaacgtaggcatcattgttctagcaaacggacagggtttgtcccagattacacagttcagagtatgtttcagcgtttgtattgtcatttggacattggctggtatgttcataggccaggtgagaactttacaaaagtttggttggctagcaaatgtcagcgtctttatgaacatctttgtcatattggtaaccatgggagtcgtttctcatcagcttccaaactacgctgcctcagttcatcccattgggccagttatcacccaggcaagagttgtacaaccatttgaatttcaagtcaccgggatccttcaattggtcttttcatatggtggtgctatgatctttatcgactttatggctgaaatgcgtagacctatggacttttggaagggtatggcttgtgctcaagttttgattacacttgtctatatgattttcgggattgtcgtctatagttatcaaggccagttcgtcgtaaatcccgcaaaccaaggtattagcggttacgcctggcaaaccgctaccaatgtgatatctttgacagctggtttaactgcagctgccttatggggaaacattggtgttaaagtcatctatgagacggttttgatgaccttctttagattccctcccctgcatacccagagaggcagagtagcatggacgttttcaaccattgtctattgggctattgcttttgttataggtacctcaatcccacagttttccaacatttcatccttggtcagtgctatttgtaccgtacagtttacatattcatttcctccgttgttagctttgggctaccaagtgcaagcagatgcagctaagggtgatagggtttgggatccatctcaacctaccccatttgctcatagagttgattcatggagagactggagcagatggcaaaggggtttgtggcccatgctgtggttgaaagtatggtacgctgttatgtgcttagctagtttagccacagctggtttgggagcttatagcgctgttgctgccatcatagctgggttcaaaactggtagccatgcttcttccttcggttgtaaatcccctgttgatgtaaggtaa

SEQ ID NO: 378 - DNA, 1695 bp, Umbelopsis versiformis
atggcaaacattgcccctggtgagttgagtttgggaggtgaccccagggtaaagggcgacgagcaagaggtgaccgagaacgacacgagtgaccaaaccttcgttgctaagcccaacttcgctgtttacttgtacttggctgcaatccaacgtcgtagagagggagtaaagatcaccaacaccttcagttccaacatcagtgagaagaacgaggggactttcgagaaggacgctgaggacgcttcaatcaaggacggataccatccagtgactggttggaacatcgctgccgacaaggctgaggctcacagagccttgagggtagctagttggatgagtgtattctacttgatcactaccgacatcttgggtccaacctcatgtccatgggctttcgcacaattgggttacgtaccgggtgtattgttgtacttgttcatgggattggctgcagcctacaccggatggcaaatctggatcatgtacttggcattggacagtgttcaattcccattgagaacctactccgacttggctggtagaatcttcggtaagactgctgagcatatcgtgaacgttttgcagagtatccaattgttgttcaacgtagctgtaatcatcttggggaacggtcaaggtttgagccaggttgcagcaaacgcaaacgtatgtttctccgtattggtattggtttgggccttggctggtatgttggtgggtcaaatccgtagtttgaagaacttcggttggttggcaaacagtgcaatctggatgaacttgatcgttatcttcatcaccatgggtgtggtagctcattccgctccaaactacttggctgctggattgcaaaacggacaaaccggcactgcaatcatcaccggagccttcatcgacactccattcaacgacaagatcgtgggggtaatgcagatcgtctacagttacggaggagctatgatgttcgtaaacttcttggccgagatgagaaggccttgggacttctggaagggtatgttgttcgctcaattggtaatcttcgtctgttacgtaatgttcggtttgttcgtatacacctaccaaggtcaatacactatcaacccagcaaaccaggggatctccatctacggctggcaaacagccacgaacgtattgtccttggtctccgctttgatcgctgctggcttgtacggcaacgtcggtatcaagatcgtataccaaaccatcatcttggacttgttgaacggaccggctatggcttccttcgcaggtcgtatcatgtggaccatcttggtaatcgcctactgggccttcgcattcgtattggctagtgcaatcccccaattctccaacatcagtggattggtagctgcagtatgcatcttgcaattcacctacaccttcccaccattgttcatgttgggctacgagatccaaagggacgctgtagctagtgaggagttcatcgacgagcaaacaggaatgccaggtaccccttccgacacatggaggtccttgtccagatggaagagaggattgaccaagagatggtacgtaaagttgttcaacttcttgatgttctgggctgcattggctaccgcctgcttgggtatgtactcctccggaaccggtatccagcaaggtttcgcagccggaggtgctactaccagtttcacatgtcaaagtccagtagcataa

SEQ ID NO: 379 - DNA, 1746 bp, Basidiobolus meristosporus
atggcttacacagcccctgtcgctttggctttggagggatcagaccctagattgcaccatgagagtttgcaccatcgtcctcatcacgacgaccatgaggagaagagtgctaagaacagtttgactcctgtggagcgtggattgggaatgtctccgtacaacactaaggacgaggtcccgttggaggcttacttgcattgggcaaccgttaagcgtgacaacgacagatggagagacagaaacaagactaaggacgagagtagtagtcaccaaaaggcagaccaggacatggagaccgaccccgatccggcagcctccgcaccacaaatcttgggatgggacttggacgcagacagattgcaggctcagagagctttgcgtagtgctagttggcaagcagtcttctacttgatcacaaccgacatcttgggtccaagtagtgcaccatgggcattcagtcaattgggatatgcccctggagtattgttgttcttcttcatgggtttggctgctgcttacaccgggtggcaattgtgggctatgttcatgaagttggacagtgagcaatacccggtaaggacctacagtgagttgtctttcagagtcttcggaaagtgggctcaacacactgtcaacatcttgcagacaatccagttgttgttcaacgtcagtgtaatcatcttgggaaacggtcaaggtttggcccaaatctcccagtacagggtatgcttcagtgtcttgacattgatctgggcattcgctggaatgttcatcggacaaatcaggtcattgaagaacttcggatggttggcaaacttcgctgtctggttgaacttgttggtcatcgtcttgactatgggagtaatcgcacacaccttgccaaacttcgcagtagcacatcagcaaaacggagtaacggggaccaaggttatcacacaggcattcatccatggaagtttgaacagtcagatcgttggtatcatgcaaatcgtatacagttacggaggagctatgatgttcatcgagttcatgagtgagatgagaaggcctatggacttctggaagggaatggcatgtgctcaagtcttgatcttcagttgttacatgttcttcggagtattcgtctaccattaccagggtcagtacaccatcaaccctggtaaccaaggaatcagttcctacgcatggcagaccgctaccaacatcttgagtttggtcagtgctttgattgctgccggattgtacgggaacatcggaatcaaggtaatctaccagaacgttgtcttggacttgatgaagggacccgagatgtcctccagagccggaagagtattgtggaccatcatggtcgtcgcatactgggtcgtcgcatacgtaatcgccagtagcatcccacaattcagtaacgtctccggattggtagctgctgtctgcatcttgcaattcacctacacttttccgccaatcttgatgttgggattccagatccaagtagacgctacaaagggagacaagcccttcgacgtcaccactggtgctacccatagggtcgacacctggagggacttgagtcgttggaggagaggattgagtccacagtggtacatcaagttgttcaacttcttgttcttcttggcagctttggtcacagcaggattgggaatctacagttcagtccaaggaatcatccagggcttcagtagaagaggagccgctaccccattcggctgtcaagctcctgtataa

SEQ ID NO: 380 - DNA, 1722 bp, Sphaerobolus stellatus
atggctacccagttgggaggattggctttggagggaaccgaccccaggttgcaagagcctgttgctgctcacgcacacaagggacgtatccccttcgaggagttgttgtactacgctaagttgcaaaggcagaaggaggtcgacgcagacaaggcctacgcaatcaccaaccccgagaagcctagtttgatcggaggattgttcaagcgtaaggacaacaacagttccgcacctgccatcaccgagaaggaggactccgtcgacgagaagagggagaagatggacaccgagaaggctccttctatggtgagtgacgaggagaagaccgcagcctacagagctatcagaactgctagttggttgagtatcttctacttgatcactaccgacatcttgggaccaactagtgctccctgggctttcagtcagttgggattcgcatccggaaccgtattgttcttcatcttgggagttatcgcattctacaccggaatgcagttgtggtacatgtacttgaagttggactccgacaagtacccagtacagaactactccgacttgactgagcgtatctacggtagattcgcaaggcatgccatcaacatcttgcaaaccttgcagttgttgttcaacgtcgctgtcatcatctgcgagaacacccaaggtttgagtcaagtaagtaagggaaaggtatgtttctccgttttggctgtaatctggatggtagccggaatgatcatcggccaaatcagatccttgagaaactacggaagtttggctcattgggccatctggatgaacttgatcgtcatcttcatcaccatgggtgccgtcgctcatagtgcaccaaacttcgctgcagccttgcaagagaacaacgtacccatgggatccggagtcgtaatcaccagtgccaagatcagtttgccgttcacagaccaaatcgtaggagtcatgcaaatggtctactcctacggtggtgctatgttgttcatcgagttgatggctgagatgagaaagccattcgacttctggaagggtatggtatgtgcccaattgttgatcgtcaccgcatacttgttgttcggagtatacgtctacgcattccaggggcaatacaccatcaacccagcaaaccaggggatctccggattcggattgcaaaccgctacgaacgtaatctccttggtaagtgccttgatcgcagctggattgtacggaaacatcggattgaaggtcatctacgtgaacatcgtccaagacttgtttggaggcccaccgttggtcagtaaggctgggaggtacatctggatcggtatcgttttggcttactgggccatcgctttcatcgtcgcaagtgctatcccacaattctccaacatcagtgccttggtcgctgctttgtgtatcttgcaattcacatacaccttccctcctatcttgtacgtcggattcgcagtgcaaagggacgctatcgacggacaggaggagtacaggccaggtatgtccgtacaacagttgagaaaggacacttggcatgacttctccagatggagaagaggtttcgggaagcgttggtggttgaacatctgtaacatcttgttgttcttggcagcattggcaaccgctggattgggagctttcagttctatcgagggaatcatcaagggattccaaaccagtggagctgcaacgtcattcggatgtagagccccagtctaa

SEQ ID NO: 381 - DNA, 1737 bp, Scytalidium sp
atggctttgcagcagcctggtactttggctttggacggtggggaccctagattgagtatgggggagggtcaggtagaggtaccagagcaagtcagacatatcttgcatgaccccaacgttactttggaggagtacatctactacgctaagatccagagagagcaagagaagcagggtttgggaccagaggagagggaggctttgtaccagcaaagtttgttggctagaaacacaaacgtttccgactctgctggatctggtttggacgagaagaaggcaatcgacgagaagcatgttgctcccacaagcgcagtgacaggaccattcagaggggttgctgctgctgagtgggagacagcttcaagagccgcaagaaacgccaagtggggtgctatcgtatacttgatcacaacggacatcttgggtccctcaaacgctccttacgctatctctcagttcggttacgtcggaggggtattggtctacacttgtatgggcatcatggctttcatcgctggttggcagatctggcgtatgttcttgaagttggactccgacagatacccaatgcgtaccttcggtgacatgggcttccgtatctacggagcttggactaggcacggtatgaacttgttgcaatccatccagttgttgttcaacgtaggcgttatcatcatcggtaacggtcaagcattgtcacaaatgtccaagttcaagttgtgtttcagtgtttgttgtttgatctggccattggtagctatgatcactggtcaaatcagaacattgcagaagttcggttacttggccaacttcgctatctggatcaacttgttggtaatcatcttcactatggcagttgcatgcaacacaggaccaaacttcaccgtgcaaccttccaatccccctggtccagtccagcacactgtttggatcccgtctggatccgacttcgactcccaattgggtgcagcaatgcagatcgtttacgcctacggtggtgctatgttgtactgcgagttcatggctgagatgaagaggcccttggacttcatcaaggctcagttcgtagctgagatcttcatctacgtttgttacttgatcttcggtttggtggtttactcccaacagggtcaattcacctacaaccctgcaaaccaaggcatcaacccatacgcttggcagactactaccaacgccttgaacttggtttccggaatcatcgctgctgtattgtacggtaacatcgggatcaaggttatctaccaaaacatcatccaagacttgttgggtggtccagagttgaccacgaagaggggcaagatcttgtgggtcggtatggttccattgtactactccatcgctttcttggtagcttctgctgtccctcagttcacaaacatctcctccttggtcgctgcagtctgtatcatgcaattcacctacacattccctacaatcttgtacttcggtatgaaggtacaagagcatgctttccacccagacgagaagttcgaccccgttactggtacagtcaacagagttgacacatggaaggagtggtcaagatggaagcgtggtttgttctctagatccttccccatgaagttgttctgtttcttgttcttcttggcttcttgtgctacggcagtgttgggtatgtacgcatccttgaagggtatcatcgacgacttcaagacgggtcattccacaagtttcggttgttcttacccaggttaa

SEQ ID NO: 382 - DNA, 1722 bp, Amorphotheca resinae
atgagtacaaatccggcagcattggctttggacggaggtgaccccaggatgagtaccggagacgctcaaatgattgcccctttggctgctaggagaatcttgcacgacccaaacgttatgttggaggagtacttgtactacgcaaagatccagcgtgagcaggaggcacagggcttgggtcctgaggagagggaggctttctaccaatctttggctgcaggaaactccagaaactcaccagacgagtccgacgagaagaaggaggttaacgagaaggcaccagtgccaaccacaacttactctggtccggcacccgcagagtgggagacagccagtagagctgctagaaacgctaagtggtccgctgtggtatacttgatcactacagacatcttgggaccatccaacgctccctgggctatcagtcagttcggttacgtaggaggtgttatcacgtacactttcatgggattgatggcattcttcgctggatggcagatctggagaatgttcttgaagttggactccgaccgttacccaatgaggacattcggagacttgggattccgtatctacggcacatggacaaggcatggcatgaacatgttgcaaagtttgcagttgttgttcaacgtaggtgttatcatcatcggcaacggtcaagccttgagtcaaatcagtaagtacagattgtgttacgcaatctgtatcttgatcttccctattgccggtatgatcgcagggcaaatcagaacattgcaaaagttcggtcatttggcaaacttcgccatctggttgaacgtattggtaatcatcttcactatggccgtggcttgtcatagtttgccaaactacgctgcatccttgggagtctacggtacaccccagggtcctgtcgagcacacagtttggatcccgtcaggtagtacgttcgactcccaattgcaagcagctatgcaaatcgtatacgcatatggtggcgctatgttgtactgtgagttcatggctgagatgaagaggccaatggacttcatcaaggcccaattcatcgccgagatgttcatctacttgtgttacttgatcttcggtttggtcttgtactcccaacaggggcaattcactttcaacccagcaaaccaggggttgtccccatacagttggcaaacagctacgaacgccatcaacatcgtcagtggcttgatcgcagctgttttgtacggtaacatcggaatcaaggtagtttaccagaacatcgttcaagacatcttgggtgggccagagttgcatagtaagagagggaagatcatctgggtcgcaatggtgcctttgtactggttcactgcttacatcttggcaagtgctgttccaaacttcaacggtatcagtagcatggttagtgctgtttgtatcatgcaattcacctacactttccctacaatcttgtacttcggattgcaattgcaaacacatgctatcacacctgaggagactttcgacccagccacaggagtcgttcacagaatcgacagttggaaggacttcagtaggtggaagagaggtttcaagcgtatgtggtggatgaaggtattctgtttggccttcttcttcgctagttgtgctaccgctgttttgggcatgtacgccagtgtgaagagtatcaaggcagctttcgacagtggtcatgctactgcattctcatgtcatagtccattggacggttaa

SEQ ID NO: 383 - DNA, 1773 bp, Botrytis paeoniae
atggcaaacaacttgggaaacttggctttggacggaggtgaccccaggatcgacggcgtcggggaggttaacgtcccgactaccgtgagaaggaacttgcatgacccaaacgtgccattcgaggagtacttgtactacgctaagatccaacgtgagcaagagaagaacgggttgggtccggaggagagagagaggatgtaccaggagtacttggctggagtcgaccatgtcgctgggaaggagatcggaaacgagaagcatgctttgccggagatcgaggacgagaaggccgagccacaacccgtcaacgagtctaagcctagtagtatcacaaaggctcatcatccttccttggttggtgcaggtgagtgggagaccgccagtagagctgctagaaacgctacttggggtgccgtggtttacttgatcacaaccgacatcttgggtccatccaacgctccatacgcagtatcacaattcggatacgttggaggcgtgatgatgtacttcttcatgggtatcatggcattcttcgctggttggcagatctggagaatgttcttgaagttggactccgacagataccctatgagaacattcggtgacttgggtttcaggatcttcgggacttacagtagacatgggatcaacttgttgcaaagtatccaattgttgttcaacgtaggtgttatcgttatctccaacggtcaagcattgagtgagatgtctaagtacaagttgtgcttcagtatctgtatcttggtctgggctttggctggtatgatcttgggccaaatcagaagtttgcaaaagttcggatacttggccaacttcgctatctggttgaacatcttggttatcttcatgaccatgggtgttgcagcccacagtcctccaaactacgacgctgttttggcctcattcggtatccctaaggcacctatcaagcataccgtctggatcccttccggctcaacattcgacagtcagttgagtagtgctatgcaaatcgtatacgcctacggtggcgctatgttgtactgtgagttcatggctgagatgaagagaccattggacttcatcaaggctcaattcttggctgagatcttcatcttcgtatgttacttgatcttcggcttggtggtatacagtcagcaaggccaattcacctacaatccagccaaccaaggcttgtctccatactcctggcaaaccgttaccaacgctatcaacttggtcagtggattgatcgctgctgtcttgtacggtaacatcggtatcaaggtcatctaccaaaacatcgtagaggacttgttcggaggccctgagttgaccacaaagaagggaaagttgatctggatcgctatcgtcccattgtactgggcattcgctttcgttttgggtagtgcagtaccacagttcaccaacatctcctccttggttgcagctgtctgtatcatgcaattcacctacacattccctacattgttgtacttcggtatgaccatcaaggaggacgctatgcatccagacgagaagttcgaccctgctaccggtaccatcaaccgtatcgacacctggaaggacatgagtagatggaagcgtggtttgatccctaggtggtggttgaaggtattctgtttcttgttcttcttggctagtgcagctaccgccatcttgggtatgtacacttcaatcaagagtatcatcgccaacttcgctttggggcatgctacctccttcggttgtacctccccagtcggttacgcataa

SEQ ID NO: 384 - DNA, 1773 bp, Monilinia fructicola
atggcaaacaacttgggaaacttggctttggacggaggagaccccaggatcgacggtgtcggcgaggtcgagatcgctactaccgttagacactccatgcataacccaaacgttccattcgaggagtacttgtacttcgctaagatccaacgtgagcaagagaagaacggcttgggaccggacgagagagagaggatgtaccaggagtacttggctggagtagacaacgtcgctcgtaaggagatcgaggacgagaagaaggctttgccggacatcggagacgagaaggccgagccacaacccgtcgacgagtctaagcctagtagtatcacaaaggctcataacgtcccttacgtcggagcaggagagtgggagaccgccagtagagctgctagaaacgctacttggggagccgttgtctacttgatcacaaccgacatcttgggaccatccaacgctccatactccgtatcacaattcggatacgtcggaggtgttatgatgtacttcttcatgggaatcatggcattcttcgctggatggcagatctggagaatgttcttgaagttggactccgacaagtggcctatgagaacatacggagacttgggattcaggatcttcggcactcatgctagacatgccatcaacttgttgcaaagtatccaattgttgttcaacgtaggagtcatcgtcatctccaacggacaaggattgagtcaaatgtctcaatacaagttgtgcttcagtatctgtatcttggtctgggtcttggctggaatgatcttgggtcaaatcagaagtttgcaaaagttcggatacttggccaacttcgctatctggttgaacgtcttggtcatcttgatgaccatgggagtcgcagcccacagtgcaccaaactacgacgctgtcttccagtcattcggaatcgcaaaggcacctatcacccataccgtctggatcccttccggatcaacattcgacagtcagttgagtagtgctatgcaaatcgtatacgcctacggaggagctatgttgtactgtgagttcatggctgagatgaagagaccattggacttcatcaaggctcaattcgtcgctgagatcttcatcttcatctgttacttgatcttcggtttggtggtatacagtcagcaaggtcaattcacctacaatccagccaaccaaggtttgtctccatacgcatggcaaaccgtcaccaacgctttgtcattggtcagtggattgatcgctgctgtattgtacggaaacatcggaatcaaggtcatctaccaaaacatcgtagaggacttgttcggaggtcctgagttgaccacaaagaagggaaagatcgtctggatcgctatcgtcccattgtactgggcattcgctttcgtcttgggaagtgcagtaccacagttcaccaacatctcctccttggtcgcagctgtctgtatcatgcaattcacctacacattccctacattgttgtacttcggaatgatcatcaaggaggacgctatgcatccagacgagacctacgaccctgctaccggaaaggtacatcgtatcgacacctggaaggacatcagtagatggaagcgtggattggcacctaggtggtggttgaagatcttctgtttcttgttcttcttggctagtgcagctactgccgtcttgggaatgtacacttcaatcaagggaatcatctcaggattcgctttgggccatgctacctccttcggatgtacctccccagtcggatacgcataa

SEQ ID NO: 385 - DNA, 1770 bp, Rutstroemia sp
atggcaaacaacatgggaaacttggctttggacggaggtgaccccaggatggcacccgtaggggaggttgccgtaccgacaccagtgagaaggaagatgcatgacccaaacgtgcaattcgaggagtacttgtactacgctagaatccaacgtgagcaagagaggcaagggttgggtccgggagagagagagaggatgtacagggaggccatcacgggagtagacgcaacaagtgccaaggagtcaggagacgaggagaagaaggctatcgcagagagtggtgacgagaagacaagtgagcccgtaaacgagaagacaacaactgctagtgtggttcatagtgctagtcacgttagtgctggcgagtgggagagtgcttcaagagctgctagaaacgcaacttggggtgctgtggtgtacttgatcactaccgacatcttgggaccaagtaatgccccatgggcagtctcccagttcggatacgttggtggagtgatgatgtacttcttcatgggtatcatggccttctttgccggttggcaaatctggagaatgttcttgaagttggactcagacaggtaccccatgaggacattcggcgacttgggtttcagaatcttcggtacgtacgctagacatggtatcaacgtcttgcaaagtatccagttgttgttcaacgttggagttatcgtcatcggcaacgggcaaagtttgagccaaatgtccaagtacaagttgtgcttcagtatctgtatcttggtttgggctttggctggtatgatcgtcgggcagatcagaacattgcagaagttcggtcatttggcaaacttcgctatctggttgaacgttttggtaatcttgttcaccatgggagttgctgcacactctgcaccaaactacgaggcagttttccagtcatacggtatctcaaaagggcctgtacatcatacagtttggatcccaagtggcaccacgttctacactcaattgggagcagctatgcaaatcgtatacgcttacggtggtgcaatgttgtactgcgagttcatggccgagatgaagagacctttggacttcatcaaggctcaattcgtcgctgagatcttcatcttcgtttgctacttgatcttcggtttggtggtgtactcccaacagggtcagttcacatacaacccagccaaccagggattgagtccctacagctggcaaactgtaacaaacgctttgtccttgttgagtggtttgttggctgctgttttgtacggaaacatcgggatcaaggtaatctaccaaaacatcgtagaggacttgtttggcggacccgagttgaccacaaagaagggtaagttgatctgggtaggtatggttcctttgtactggaccgtagccttcgttttgggtagtgctatccctcaattcaccaacatcagttccttggtcgctgcagtttgtatcatgcagttcacatacactttccctaccttgttgtacttcggcatgaccatcaaggaggacgccatccatccagacgagaccttcgacccagcaacaggtgctgtacacagaatcgactcttggaaggacttgagtagatggaagagggggatgaagaacttgtggtacgttaaggttttctgtttcttgttcttcttggctgctttggcaactgcaatcttgggtatgtacacttccatcaaggacatcatcgcagacttcgctttgggacacgctactagtttcggatgtacaagtcctgttggatacgcctaa

SEQ ID NO: 386 - DNA, 1803 bp, Pichia membranifaciens
atgtccgagttgaagtctgtatcctccccagcagcaatcttgtcaggagttatcagtaacaacgcaaacgccttggacaacttcgagatcaaggcagacgaggtcgacgagttcttcgacgttcctttggaggagttcttgtaccatgctaagttgcaaagggagttggagaagtctccggactacggtgaggcagctccaaccgtaccgttgtggaacgtaatcaagacaagattgttgaacaagccttccggaaagatcgttactgccgcaggtgcatccgactcccactctgctacatcattccgttccagtgcagaggaggtttccgagaaggacgagaagttgcaaatcgttaaccagcaaagctacgacttgatcaacgagccaatctacacatccaaggagaacgccaacagaatgttgagggtcgcttcctggggatccgttttctacttgatcacaaccgacatcttgggacctacttccgcaccctacgctatcgctcaattgggttacgttccgggagctttgttgtacttcttgttcggtatcaccgctgcatactgtggggcattgttgtggcatcagttcttgcacttggactccatcaagtacccgttgcgtaactacggtgacatcgtgggcaggatctacggtcaatacactagatacttcatcgacttcttccagtccgtccaattgttctgtaacgtggctgtaatcatcttgggaaacggacagggtttgtcccaaatcgctaagggtaagggttgttacacaatcttgatcttcgtttgggcaatcgcaggtgctatcgttggtcagatcagatccttggcaaagttcggtttcttggcaaacgcagcaatctggatgaacgtcttcgtaatcgtcgctaccatggcttgtgtcagtgtgtccttgccgaactacgtcgcagctgcaggaactggacatatcgtagaaggtccggtgatcactcatgtcgtaatctccggtgctggtgaccaattccagtcccaattgaacgcttgtatgaacatcgtatactcctatgggggtgctttggtattcatcgagttcatggcagagatgaagaggccttgggacttctggaagggtatggcttgtgcccagttgttcatcttcaccgtatacttgatcttcgccatggtcgtgtaccactaccaaggccaattcgtcatcaaccctgcaaaccaaggtatcagcacctactcctggcagactactacaaacgtcgtcaacttggtgtccgccttgatcgctgcaggtttgtacggcaacgttggcatcaagtgcttctacacctccgtgttccaaaggttcttcaactggccagctttggcatccaagttcggcagaatcatctggactgttttcgtttgtgtctactgggccatcgctttcgtcttcgcagctgcaatcccaaacttcagctccttggtttccttgatcggagccgtttgtatcttgcaattctcctacacattccccttcatcatgcaattcggcttcgacatccaagtaggtgctttgaccggtgacggtgagtacgacccagtaaacaagatcacccaccgtgttgactcctggaaggactggtccagatgggcaagaggctacaagcaaaagtggttcgcaaacacatgccatttgatcttgttcttcgccagtgctgctactgctgccttgggtatctacagttcctccatgtctttgaagaaggctttcgcagacggtacgacaacttccttcacatgcaagtccccaatcgcttaa

SEQ ID NO: 387 - DNA, 1815 bp, Pichia manshurica
atgtccgagttgaagcctgtatcctccccatccatcatcttgtccaacgttatctcaaacaacgcaaacgccttggacaacttcgagatccaggacgaggaggtccaagagttcttcgacgttcctttggaggagttcttgtaccatgctaagttgcaaagggagttggagaagtctccggactacggtgaggcagctccaaccgtaccgttgtgggaggtaatcaagacaaagttgttgaacaagcctccatcccaaaagactccacagtccttgtccgacacgcattcaaacaactccttcaagagttccatcgaggaggtttccgagaagaacgagaaggacaacgagaagttgcaagtcgttaaccaagagtcctacgacttgatcaacgagcctttgtacacttccaaggagaacgcaaacaggatgttgagagtagcatcctggggaagcgttttctacttgatcacgacagacatcttgggtcctacctcagctccttacgctatctcccaattggggtacgttccgggtgctttgttgtacttcttgttcggtatcgctgctgcctactgcggttgcttgttgtgggacttgttcttgcaattggactccatcaagtaccctttgagaaactacggggacatcgtcggaagaatctacggtagatacacaagatacgctatcgacttcttccaatcaatccaattgttctgtaacgtcgccgttatcatcttggggaacggtcaaggattgtcccaaatcgctaagggtaagggatgctacaccatcttgatcttcgtgtgggctgttgcaggtgctatcgtgggtcaaatcagaaccttggctaagttcggtttcttggcaaacgctgctatctggatgaacgtcttcgtaatcatcgctacaatggcctgcgtttccgcctttgggccaaacttcacagcagctgcaggaacaacaggcgcagtggaaggcgctgttatgacaaaggttgttgtttccggtgcaggttccgagcaattccaaaaccaattgaacgcatgtatgaacatcgtgtactcctacggtggtgctttggttttcatcgagttcatggcagagatgaagagaccttgggacttctggaagggcatggcctgcgcacaattgttcatcttctccatctacttgatcttctccatggtcgtttaccattaccaaggtcaattcgttgttaacccagcaaaccagggtatctccaactacggttggcaaactaccacaaacgtgatcaacttggtatccgcattgatcgcagctgggttgtacggcaacgtgggtatcaagtgtttgtactcctccgttttccaaagattcttcaagtggccagcattgtctacaaagatcggtagaatcatctggacattcttcgtctgcgtttactgggcaatcgcattcgtattcgcagcagcaatcccaaacttctcctctttggtctcattgatcggagcagtttgcatcttgcaattctcttacactttcccattcatcatgcaattgggattcgacatccaattgggtgccttgacgggtgacggtgagtacgacccagtcaacaagatcacacatagggtcgacacttggagaaactggtcccgttgggccagaggttacaagcaaaagtggttctccaacacttgtcatttgatcttgttcttcgcttctgccgctacagctgcattgggtatctacgcatcctccatgtccttgaaggaggctttcgagtccggttcaacaacgtccttcacttgtaagtcccctgtcgcttaa

SEQ ID NO: 388 - DNA, 1803 bp, Candida ethanolica
atgtccgacttgcaccctatcccatccccatcctccatcttgtccaacgtaatctccaacaacgcaaacgccttgaacaacttccagatcgacacctccgaggagttggacgagttcttcgacatccctttggaggagttcttgtaccaagccaagttgcagagggagttggagaagacgcctgagtacggcaagccagctcccaccgtgccattgttggagatcatcaagaccaagttgttcaacaagtccaccgacaacaacgagaacaagatcatcgagaagaactcctccaacaactccgacatgtccacattcgactccaacatctccgacgacgagaagaagttgaagatcatcgacaacaacgacttgatcaacgagccattgtacaactccaaggagaacgcaaaccgtatgttgagagtcgcctcctggggatccgtattctacttgatcactaccgacatcttgggacctacttccgctccttacgccatctccgagttgggttacgtaccaggggcattgttgtacttcttgttcggtatcaccgcagcttactgtggcgtgttgttgtggtcccaattcttgaagttggactccatcaagtaccctttgagaaactacggtgacatcgtagggcgtatctacggaaagtacacaagatacgcaatcgacttcttccaatccatccagttgttctgtaacgttgccgtaatcatcttgggtaacggacaagggttgtcccaaatcgctaagggtaagggttgttacaccatcttgatcttcgtatggggagtagccggagctatcgttggtcaaatccgttccttggctaagttcggtttcttggcaaactccgcaatctggatgaacgttttcgtcatcatcgcaaccatggcatgtgcttccgccttcttgccaaactacacagcagcattgggaaccaacaacatcccagaaggccctgtgatcacaaagatcgtcatctccggttccggttccaccgcattccagtcccaattgaacgcttgtatgaacatcgtatactcctatgggggtgctttggtattcatcgagttcatggcagagatgaagaggccttgggacttctggaagggtatggcttgtgcccagttgttcatcttcacaatctacttgttgttcgccatggtcgtctaccactaccaaggccaattcgttatcaaccctgcaaaccaaggtatctccaactacggttggcagactactaccaacgtcatcaacttggtgtccgccttgatcgctgcaggtttgtacggcaacgtaggcatcaagtgcttgtactcctccgtcttccaaaggttcttctcctggccagctttgaactccaagttcggcagatggatctggaccgtattcgtatgtatctactgggccatcgctttcatcttcgcagctgcaatcccaaacttctcctccttggtatccttgatcggagccgtatgtatcttgcaattctcctacactttccccttcatcttgcaattgggcttcgacatccaattgggtgctttggagggtgacggtgactacgacccagttaacaagatcacaaaccgtatcgactcctggaagaactggtccagatgggtaagaggctacaagaagaactggttcaagaacacctgccatttgatcttgttcttggcctccgctgctaccgctgccttgggtatctacgcctccgctatgtccttgaaggaggctttcgagtccggtgccactacctccttcacttgcaagtccccagtagcttaa

SEQ ID NO: 389 - DNA, 1782 bp, Pichia kluyveri
atgtccgagttgaagcctgtccaatccccaggctccgttatctccaacatcatctccaacaacgcaaacgccttggacaacttcgccttggagaacgacgacttcgacgagttcttggacgttcctttggaggagttcttgcatcatgctaagttgcaaagggagttggagaagtctccggactacggtgaggcagctccaaccatcccgttgtgggaggtcatcagaacaaagttgttgaacaaggagccaaagaactacgctggtaacaccgaggcattgacgatccagaactcctccaacgtcgcctccttggacaagatcgacgagaaggttcaaactacagacgacttgatctccgagccattgtacacttccaaggagaacgcaaacagaatgttgaggatcgcttcttggggttccgttttctacttgatcacaacagacatcttgggtccaacttccgcaccttacgcaatcgcacaattgggatacgtgccaggcgctttgttgtacttcttgttcggaattgccgctgcttactgcggtgtcttgttgtggaaccaattcttgttgttggactctatcaagtaccccttgagaaactacggtgacgtcgtgggtcgtatctacggtagaggtgtgcgttactccatcgacttcttccaatccgtacaattgttctgtaacgtagctgtaatcatcttgggtaacgggcaaggattgtctcaaatcgcaaaggggaagggttgttacactatcttgatcttcgtttgggctatcgcaggtgccatcgttggacaaatcaagtccttggcaaagttcggcttcttggcaaacgcagcaatctggatgaacgtcttcgtaatcatcgctactatggcctgcgtctccaagtggggtccaaactacgtagctgccttgggtacgaccgggaccacaccaggacctgttttgacacatgtcgtaatctcaggtggctccaacgagcaattccaaaaccaattgaacgcatgtatgaacatcgtatactcctatggcggtgcattggtgttcgttgagttcatgtccgagatgaagagaccatgggacttctggaagggaatggctgccgctcagatgttcatcttctccatctacttgatcttcgctatggtcgtgtacaagtaccagggtcagtacgtaatcaacccagccaaccagggaatctccgagtacggttggcaaacaacgaccaacgttatcaacttggtttccgcattgatcgctgctgggttgtacggtaacgttggtatcaagtgtttgtacaactccatcttccagagattcttccattggccatccttgaacacaaagatcggtagatggatctggaccgttttcgtctgcgtctactgggctatcgctttcgtattcgcagccgctatcccaaacttctcctccttggtttccttgattggggctgtctgtatcttgcaattctcatacactttccccttcatcttgcaattcggtttggacatccaattgggagccttggttggtgacgagccatacgactacgttaacaagatcactcatagagtcgactcctggaggaacttctccagatgggcaaggggatacaagcaaaagtggttcgccaacacggtccatatcatcttgttcttggcctccttggctactgctggcttggggatctactcctcctcaatgtccttgaagtcagctttccaagacggaactacaacatccttcacatgtaagtccccagttgcctaa

SEQ ID NO: 390 - DNA, 1740 bp, Saccharomycopsis malanga
atgccagctttggacgcaatcaagtccgctgcatccgttgccatctccgagaacggcaaggccttgcaaaacttcgtgcctcaagaggttgagagagctggtttcgacgagttcttcgacgttcctttggaggagttcttgtaccatgctaagttgcaaaggcaagtagagaagtctccggagtacggtgaggcagctccaaccatcccgttgtgggcattggttaagaagaacttgttgggtaagggaccaaagacagaggctatcgacacctccgagactccgtccaacgagaaggaggagtcccacgacttggtatccgagccagcatcagcttccttggagaacgcaaacagaatgttgagaacggcatcctgggggtccgttttctacttgatcactacagacatcttgggtccaacttctgctccctacgctatcgcacaattgggatacgttccaggatccttgttgttcttcttgttcggtatctgtgccgcttacactggtgtattgatctggaacatgttcttgaagttggactccgtaaagtaccctttgagaaactacggggacatcgtaggcagaatcttcggcaggaagacaagatacgctatcgacttcttccaggctgtacaattgttctgcaacgtcgcagtaatcatcttgggtaacggacaaggattgtcccaggttgccaaggggaagggttgttacactatcttgatcttcgtatggtccatcgctggtatgatcgttggtcaaatcagatccttgcaaaagttcgggttcttggcaaactccgccatctggatgaacgttttcgtcatcatcgctacaatggcatgtgtttccggtgagttgccaaactacgttgctgcattgggcacaaacgacgtaaccaagggtccagtcgtgacgaacgttgtggtctcaggctccggtggaaacttcacacctcaattgaacgcatgcatgaacatcgtttactcctacggtggtgctttggtattcgttgagttcatgtccgagatgaagcgtccattcgacttctggaaggggatggcttgtgcacaattgttcatcttctccatctacttgttgttcgggttgatcgtctaccattaccaaggtcagttcgtgatcaacccagccaaccagggaatctccaactacaactggcagaccgccacaaacatcgtgaacttggtttccgctttgatcgctgcagggttgtacggtaacgtgggtatcaaggtaatctacgtatcagtgttccagagattcttgcatttcccgtccttggtgtccaagaccggacgtatcatctggacagtgttcgtatgcatctactggggagttgctttcgtattcgcagctgccatcccgaacttctcctccttggtttccttggttggtgccgtttgtatcttgcaattcacttacactttccctttcatcatgcaattcggtttggacatccagatcgacgcattgtctggcgacggagagtacgaccatgttaacaaggtcacccatagagttgactcctggagaaacttgtcccgttggacgagaggatacaagaagcattacatcaggcacactgtacatatcatcttgttcttggcttccttggctacggcagccttgggtatctactcctcctccatgtccttgaagcatgctttcgccaagggtagaactacatcattcacatgtaagagtccagttgcttaa

SEQ ID NO: 391 - DNA, 1743 bp, Schwanniomyces occidentalis
atgagtgctttgcaggcaatcaagagtatcggctccgaggtgttgtccgagcctggcagaatcatggagaactgtgggagagaggggttggaggacgacgactacaacatccccttggaggagtacttgtaccatgccaagttgcaaagagagttggaggcatccccagactacggtgaggcagctgctactgtcccattgttcgagttgatccgtgtcaagttgttgaagaaggagccaagaaacgcaagtcctgtcatcgcagacgacgacgaggcagagaaggttccctccgagaaggagttggtgcatgacttgatcagtgagcctttgagtaccagtaaggagaacgcaaacagaatgttgcgtaccgctagttggggtagtgttttctacttgatcactaccgacatcttgggtccaaccaatgccccatacgcaatcagtcaattggggtacgttcctggatccttgttgtacttcttgttcggaatctgcgctgcatacaccggttacttgatctggaacatgtacttgaagttggacagtaccaagtacccattgaagacatacggagacatcgtgggtaggttgtacggcaagactaccagatacttgatcgacgtgttgcaaagtatccaattgttctgcaacgtcgcagtattggttttgtccaacggtcaaggtttgtccgaggtcaccaagaacaagggatgctacaccatcttgatcttggtatgggccttggctggtatggttgttggtcaaatcaagagtttgcaaaggttcggcttcttggcaaatgccgcaatctggatgaacatcttcgtgatcgtagctaccatggcttgtgtagctaagtgggacccagactacgctgcagcctacggtgtctcccatgtcttgaagggtcccgtggtgaccaaggtggtcatctccggaagtggaggaaacttcaagaaccaattgaacgcctgcatgaacatcgtctacgcatacggtggtgctttgatcttcatcgagttgatggctgagatgaagagaccttgggacttctggaagggtatggcttgtgctcaaagtttcatcttcactgtatacttggtattcgggttgatcgtttaccactaccaaggccagttcactatcaatcccgcaaaccaaggtatcgggacctacggctggcaatccgctacaaacgtggtcaacttcgtaagtgctttgatcgcagctggcttgtacggaaacgttggtatcaaggtcgtctaccagacaatctgcgagagattgttcaagttccctcccttggagggcaggaagggcagagtaatctggttcgttgctgtcatcatcttctggggtttggctttcgttttcgctgccgcagtgccaaacttcagtagtatcgtatccttggttggcgctgtttgtatcttgcagttcacctacaccttccctttcatcttgaagttcggcttggacttccaaatgggagcattggtcggtgacggaccatacgaccatgttaacaaggtgacccatagaatcgacagttggaagaacccatcaagatggatcagggcttacaagcaaaagtggttgttgaacaccggtcatttgatcttgttcttcgcaagtttggctactgccgcattgggtatctacagtagtgccgagagtttgaaggacgcattcgaggacggtaccagtacaagtttcacctgtaacagtccagttgcataa

SEQ ID NO: 392 - DNA, 1734 bp, Zygoascus meyerae
atgagtaacttggaggcagtacatagtgctatgtccgacatcatccaagagaacaagcaagccttgaagaacttggcccatgagaacttggacgaggaggtagtcaagagttgggacgagttgcctttggaggagttcttgcatcatgctgtgaagcaaagggcattggagggcaccgaggagtacggtcccgcagacagtgcaatgccgcaattggcattggctaagaagatcttgagaaaggagaaggaggtctccggtgaggagaacgacaacagtgctgtggctcacgacaacggttctagtgacgtagccttcggaaccgttgagcaggcaaacttggctttgaggaacgctagttgggttgccgtattctacttgatcactaccgacatcttgggtcctaccagtgctccgtacgctatctcccagttgggtttcgtaccaggttccttgttgttcttcttgttcgggatcgtagcagcttacactggctacttgatctggaagttgttcttgaagttggacagtgctacctaccctttgagaaactacggcgacactgctggccgtgtcttcggtggctacgccagatacttggttgacttgttgcaagcaatccaattgttgtgtaacgttgctgtgatcatcttgggaaacggacagggtttggcacaaatcgcagctggtcccagtggcactaagaacgtttgtttcagtgtattggtggttatctggtccttcgctggtatgatcgttggtcaaatcaagagtttgcaaaagttcgggttcttggcaaacaccgccatctggatgaacttgttcatctgcttcgctaccatgggctgtgttgcacatagtaagccaaactacagtgctgcattgtctcaattgggaatccccgagggtccagtcatcacgaaggctgtgatctctggcagtggtaacttcactacccaattggaggcatgcatgaacatcgtttactcctacggtggtgctatggtattcgtcaacttcatggctgagatgaagaggccctgggacttctggaagggtatgatcatggctcaaagtttcatcttcgttgtatacttgttgtacggtttgttcgtttacgcttaccagggtcaattcgtgatcaaccctgcaaaccaaggcgtaagtggttacgcttggcagactgtcttgaacgtgatcaacttggttagtgcattgatcgctgctggattgtacggtaacgtagggatcaaggttgtatacactaccttcatccaagggtgggcaagaggtccagccttgcactctaagaagggcagagtggtatggttcttcatggttatcatctactgggcaatcgctttcgttatcgcttccgctatccctcagttcagtgctttgaccggtgtaatcggtgcagtctgtatcttgcaattcacttacaccttccctcctttgatcaagttgggtttcgacatccaagtgaacgctatgactgcagacggtccttacgaccccgttaccagaactaccaacagagttgacacttggaagaactggtccagatggagacgtggtatcttcaccaacttctggaagaacttcggtcatttgatcttgttcttggctagtttgtgtactgccgtattgggatgttacagtagtatcaaggagatggttagtgctttcagtggtgggagtagtaccagtttcagatgtaccgcaccggtttaa

SEQ ID NO: 393 - DNA, 1857 bp, Meliniomyces variabilis
atggctagtcagaacttggcaaacttcgctttggacggtggggaccctagaatgggcgagaagaacccagggcaatacgcattggaccatggccatgagggtggcttgcaaacaggtttcagtatcgaagccgctcaggtacataacgactctagcatcttgttcgaggagtacttgcactacgctcaaatcactagagctgaggagcgtgagtacgagggaaacttgatcaagcgtaaggacccgtggagtttgggaggtatcatcaagaacagattcagtaagggtcacgttcatgaggtcaacgccgtagtcgacggaaaccaaatcacaactacccataacaactggagtaccgtaaccgacttggagtggagacaggctagtagagctaccagaaccgcaagttggggctctatcttcttcttgatcactaccgacatcttgggtcctagcggtgctccttgggcattctccaacactggttacggaccaggcgctgcattgtacaccgtattcggtttgatggcttcaatcagtggatggtacgtatggggtgtatacatgcacatggactccgaccgttaccccttgcgtgacttcggacaagctttcttccgtgtattcggcaaggaggtaagacacttgatcaacgttttgcaatctttgcaaatgttcatgttggtagctgttttgatcttgtctttgggtggaagcgtatcccaggtcagtatcggacaaaacggtgctcatggaaacggtttgtgtttcatcgtatgtttgttgatcatcgctatcttgggtatgatcttgggtcaaatcagaacattgcaaagattcggatggttggcaaacttgagtgtctggaccactgtaatcacttccttgatggcagttggtgttgcatgtaactccgacccgaactacgccactatgttcggaagtttcggaggtgcaggaagtgcattcggcgacttgaacttcccaaacggaaccgtagagagtcatatccctatcaggaccttcgcaggtacccctcccgacggatacgccagtggtgggaccggtttcttgggtacctaccaaggtatcaacaccatcatctacgcctacggtggcgctatgttgttcttcaacttgttggcagagatgaggaacccctgggacttctggaagggcatgttgtgtgccgacgtcttcatctacttggtatacatgttcttcggtttgttgcagtacagtcaacagggtcaatacacttacaacaccgccatccaatctatcaacccatacaactaccaaacagccggtaacatcttgtctatcgtaggaggtttgatcgctgcagctttgtacggaaacatcggtatcaaggttatctacaacaacgtattcatggagttgttccatttcccagcattgactaccaagaggggaaagttgatctgggtagcaatggtgccaatctactggtccttggcattcgtaatggcaggcgctgtcccagagttgggtgacatcagtagtttggttggcgctttctgtatcggtaacttcacctacaccttcccagccttgttgaagatcggtttcgagatcaagaagggtgctatgttgcccgaggagagtttcgacgaggctacaaagaagtacgtaagagtagacagtggattcaagagatggatcagaggctaccgtaagaccttcttgttgaccagtttcaacatcttctacttcttgggagctttggtagtttgtggattggggtgctacagtgccatcgaggctttgatcggtgctttcagtggcggtagtgttgctacatccttctcctgtacctcaccttacgcaggataa

SEQ ID NO: 394 - DNA, 1860 bp, Cadophora malorum
atgagtaacttggccaacttggctttggatggcggagacccgaggcaaggtgagaagaagaacccaaaccagtacgccttggaccacggtcacgaggctggtttggcaaacggcttcaccatcgaggcagcccaagtgcataacgacccaaacatcttgttcgaggagtacttgcattacgcaagtatcactagggctgaggagagagtgtacgagaagtccaccgtaaagagtgacgagccattctccttgggaggattgatcaagtcaaggttcagtaaggggcataagcatgagatcaacgctgtggtagagggaaaccaaatcaccacaacccataacgactggtccaccgtaaccgacttggagtggagacaagccagtagagctaccagaaccgcttcctggggttctatcttcttcttgatcacaaccgacatcttgggtccaagtggggctccatgggcattctcaaacaccggatacggtcctggcgtcgctttgtacactaccttcggtttgatggcaagtatcagtggttggtacgtatggggagtttacatgcatacagactccgacagacaccctttgagagacttcggtcaagctttcttcagggtgtttgggcctgctatgagacatttgatcaacgttttgcaaagtttgcaaatgatcatgttggttgctgtattgatcttgtccgagggtggtaaggccagtcaaatctctatcggaagaaacggggagaacggtaacggtttgtgtttcgtaatctgtttgttgatcatcgccttgttgggaatggtgttgggtcaaatcagaaccttgcagagattcggttggttggcaaacttcagtgtattgactaccgttttgacctccttcttggcaatcggaattgccgcaaccagtgagccgaactacgctacaatgttctccagtttcggagcaactaccgcagtacctttcggcgaggtcaacttcccaaacggaaccgtagagagtcatatccctatcaggaccttcgcaggtaccccagactacggatacgccagtggtggggtaggtttcttgggtagtttccaaggtatcaacaacatcatctacgcctacggtggcgctatgttgttcttcaacttgttggcagagatgaggaacccctgggacttctggaagggcatgatcgttgccgacgtcttcatctacttggtatacatgttcttcggtatcttccagtacagttaccagggtcaatacactttctccagtgccatccaatctatcaccccattcaactacaggacagccggtaacgttttggccatcatgggaggtttgatcgctgcagctttgtacggaaacatcggtatcaaggttatctacaacaacgtattgatggagttgttccatttcccacccttgaccagtaagaggggaaagatcgcatgggtattcgtagtgccagtttactgggctgttgcatacgtaatcgcaactgctgtcccaaacatcggtgacatcagtagtttggttggcgctttctgtatcggtaacttcacctacaccttcccagccttgttgaagttgggtttcgacatcaagaagaacgctatgttgcccgaggagagtttcgacaccgagacaagacgttacaccagattggacgacggatggaagagatggtggagaggctacaagaagagtttctggatgagtagtttcaacatcttgtacttcttgggaagtttggtagtttgtggattggggtgctacgctgccatcgaggctttgatcagtgctttcggaaagggtggtactaccgccactcatttcagttgtacaagtcctttcgcaggataa

SEQ ID NO: 395 - DNA, 3720 bp, Aureobasidium melanogenum
atgggttcacagaacttggcaaacttgactttgggaggtggggaccctagagaggaggagaagaacccagccttgttcgcattggaccatggccatgaggcacctgcagacacggctgttggtttctccatcgaagccgctttggttcataacgacccaaacgtcttgttcgaggagtatttgcattatgccgcaatcactagggcagaggagcgtgagtacgagaagacaatcgagaagaagccgttcactttcaagggtatgatcaagagtagattctctacgggtcacaagcaaacattcgaggacgacaacacaaaggacggtagaacggttgcttacacaaacgcagctgaggttaccgacttggactggagacgtgcttcaagagctactagaactgcaacttggacgagcatcttcttcttgatcactacagacatcttgggtcctacgggtgctccttgggcattcgcaaacaccggtttcggaccaggcgttgcattgtacacagttttcggtgggttggctgccttgtctggatggtacgtatacttgactttcttgaagttggactccgaccgttaccccatccgtgacttcggacaagctttctaccgtgtttttggcgctccaatgagacacacggtcaacatcttgcaaaccttgcaaatgttcttgttggttgctgtcttgatcttgaacaacggtggagccatcagtgagatctctatcggagagaacggtaagaacggaaacggtttgtgtttcatcatctgtttgttgatcttggctatcttgggtgtggtattgggtcaaatcagaaccttgcaaagattcggatggttggcaaacttgtcagtctggacaaccgttatctgttccttcttggcaatcggtgcctcagctacatctccaccgaacttcgccgtcatgttgtcaactttcggaggtaagggaacagcatacggcaacacgaacttcccagacggaacaatcgagtcacatatccctatcaagacttttggcggtacacctccctacggataccagtcaggtgggacaggtttcttgggttctttccaaggtatcgaccaaatcatctacgcctatggtggcgctatgttgttcttcaacttgttggcagagatgaggaacccctgggacttctggaagggcatgttggcagccgacatcttcatctacgttgcttacatgttcttcggtttgttccagtacgcttaccagggtcaatacacatacaacacagccatccaaagcgtaggatcttacggtttgcaaactgccggtaacatcttgtccatcatcggaggtttgatcgctgcagctttgtacggaaacatcggtatcaaggtcatctactcaaacgtattgatggagttgttcaacttcccacccttgactgctaaggcaggaaagtacatctggatcgtattggtgccagtatactgggccttggcattcgttgttgcagcagctgtcccattgttgggtgacttctcttctttggttggcgctatctgtatcggtaacttcacatacactttcccagccatgttgagaatcggtttcatggtcaagcaggctgctatgttgcccgaggagactttcgacgtagctacgggaaagtaccatagagttgactctggaatcaagagatggatgagaggctatcgtaagactttcgttatcactacattgaacatcatctacttcttgggagctttggtagtctgtggattggggtgctacgctgccatcgaggctttgatccaagctttgtcaggcggttcagtcactacctccttctcctgtaagagcccttacgcagcaagttaaatgggttcacagaacttggcaaacttgactttgggaggtggggaccctagagaggaggagaagaacccagccttgttcgcattggaccatggccatgaggcacctgcagacacggctgttggtttctccatcgaagccgctttggttcataacgacccaaacgtcttgttcgaggagtatttgcattatgccgcaatcactagggcagaggagcgtgagtacgagaagacaatcgagaagaagccgttcactttcaagggtatgatcaagagtagattctctacgggtcacaagcaaacattcgaggacgacaacacaaaggacggtagaacggttgcttacacaaacgcagctgaggttaccgacttggactggagacgtgcttcaagagctactagaactgcaacttggacgagcatcttcttcttgatcactacagacatcttgggtcctacgggtgctccttgggcattcgcaaacaccggtttcggaccaggcgttgcattgtacacagttttcggtgggttggctgccttgtctggatggtacgtatacttgactttcttgaagttggactccgaccgttaccccatccgtgacttcggacaagctttctaccgtgtttttggcgctccaatgagacacacggtcaacatcttgcaaaccttgcaaatgttcttgttggttgctgtcttgatcttgaacaacggtggagccatcagtgagatctctatcggagagaacggtaagaacggaaacggtttgtgtttcatcatctgtttgttgatcttggctatcttgggtgtggtattgggtcaaatcagaaccttgcaaagattcggatggttggcaaacttgtcagtctggacaaccgttatctgttccttcttggcaatcggtgcctcagctacatctccaccgaacttcgccgtcatgttgtcaactttcggaggtaagggaacagcatacggcaacacgaacttcccagacggaacaatcgagtcacatatccctatcaagacttttggcggtacacctccctacggataccagtcaggtgggacaggtttcttgggttctttccaaggtatcgaccaaatcatctacgcctatggtggcgctatgttgttcttcaacttgttggcagagatgaggaacccctgggacttctggaagggcatgttggcagccgacatcttcatctacgttgcttacatgttcttcggtttgttccagtacgcttaccagggtcaatacacatacaacacagccatccaaagcgtaggatcttacggtttgcaaactgccggtaacatcttgtccatcatcggaggtttgatcgctgcagctttgtacggaaacatcggtatcaaggtcatctactcaaacgtattgatggagttgttcaacttcccacccttgactgctaaggcaggaaagtacatctggatcgtattggtgccagtatactgggccttggcattcgttgttgcagcagctgtcccattgttgggtgacttctcttctttggttggcgctatctgtatcggtaacttcacatacactttcccagccatgttgagaatcggtttcatggtcaagcaggctgctatgttgcccgaggagactttcgacgtagctacgggaaagtaccatagagttgactctggaatcaagagatggatgagaggctatcgtaagactttcgttatcactacattgaacatcatctacttcttgggagctttggtagtctgtggattggggtgctacgctgccatcgaggctttgatccaagctttgtcaggcggttcagtcactacctccttctcctgtaagagcccttacgcagcaagttaa

SEQ ID NO: 396 - DNA, 1815 bp, Daldinia fissa
atggctactcatccgcctgcaaacttggctttggacggtggggaccctagaaagccctcattgcaagctggggacgggatctctgggactgcaagtatcgagtatacaaacaacagagaggttagtttcgaggagtatatgtaccatgctgctgccactagggcacaagaggaggaggccaacgctaggtatatcgctgctaggggaccgcaaacgttcaagaacgtaatcaaggggagattcagcaagggtcacgcagagcaagacgcctatgcagaggttgtgggttccatctctagagagacagacgagaagggacatggtaacgacgccttgcaagttgctggtaacggttcaactgagaactatggtatcactgaggctcaaagacaaactgcaaacagggctttgcgtacggcttcttggggcaccgttttctacttgatcactacagacatcttgggacctacaggggcaccttgggctttcgcacagttgggttatggtccaggtgttgctttgtatacagttttcggtgctatgtcctactacagtggctggatcttgtggaagatcttctgtggcttggactcagacaggtaccctatcagaggttacggggacttcttcttcagaatgtttggtccctgggcaaggcatttcgtgaacttggcacaagctttgcaattgttgttgaacgtcagcgttatcatcttgtcaaacggccagtctatcagtcaaatctctagaggtagttcaggtgagtctttgggtatctgtttcgtcgcctgcatgatcatcttcatggcagctggtttcgttttgggccagatcagaacattgcagagattgggatggttggccaacttgagtgtttggttgaccgtgacattgatcttgttgtgtatggtttccgtgatctacggtccgaactatgcagcagttgagacatctttcggattgtcaccaggcatgcccatcagaacttatgcaggtactcctccaccaggtatggctaccggtggtgtcggtttcgtagcctctttgaacggcttgaacgtggctgtatacgcatacggtggtgctttgttgttcgctgctttgttggccgagatgaggcatccattggacttctggaagagcttgttggttgccgagatcttcatctacgggatgtatatgttcttcggcatcttcatgtatagttaccaaggacaatacacttacaatccagccgtacaaggaatcgctgcttacggaatccaaacagctgggaacatcttgtcattgatctcaaacttgattgccgctgtcttgtactccaacatcggattgaaggttgtctatatcgaggtattccatgagttgttgggtttcccagagttgacgacaagaactggtaagatctggtgggctgcattgatcccattgtattgggcaatcgcattcatcatcgcagccgctgtaccacaattctcctatatcgttggtttggtcggtgccttgttcatcttgtccttcacttacacatttcccgcttggttggcaatcggttactgggtcaagaaggacgccatgatcgagggagaggagagattcgatccggctacaggtacctataactacgttgaccacggttggaagagatggagaagaggtttcatgagaaagccgttcttcaacgctttcaacatcttctacttcttgggtgccttggtaacttgtgccttgggttgttatagttcaatcgagagtttgagacaagccttccaatcaaacatcgccacttctttgtcttgtactcctcccttgtaa

SEQ ID NO: 397 - DNA, 1809 bp, Monilinia fructicola
atggctcaacccttggcaaacttggctttggagggaggtgaccccagggaccctcaccatccgatcagaggggacgccacagctgtggagttggcaatgttgtccgctatccacgacccatcaatcagtttcgaggagtacgtatactgggctgagatcaccagggcagaggagaagatcgcaaacgagaagttcatcactgcacaagggccacgttcctggaagtccacaatcaagaacagattctccagaaccaaggctactccagagtcctacgactctccgccagccacaactttggctgcaaacgagaaggacggattggacgagaagtctatcgttccaggtgagtcagacggtagtccacgttcagctgttagcgaggctgagtggaagagagcttccagagctgtgcgtactgctggttggagtggtgtattctacttgatcacaacggacatcttgggacctttctccgtaccttgggctttcgcccagatgggctacggtccaggtatcgctttgtacactgtgttcggtttgttcgcattgtacagtggttggcaaatctataacatctacttggcattggacagtgacaagtacccagctaagtcctatggtgacttgttcttcagagttttcggcacctgggcaagacatggcgttaacatcgcacaatccatccaattgttgttcaccgtgtctatcttgatcttgtccaacggccaatcaatctcccagatctctaagggaaacttgtgtttcgttgtttgtttggtagtcttcatggctgctggaatgatcttgggtcaaatcagaacattgcagagattcggttggttggcaaacttcgctgtatggatcaacgtcttgatcatcttcatctgtatgggagtagtcgcaaactcagctccgaactacgctacggtcgaggcatcattcggagacactttcggaccaggtcccgtccaccgttatgctggtacccctcctgctggtaaggctacaggaggtgacggtttcgtcggttcattgaacggtttgaaccaggctgtctattcatacggtggtgctatgttgttcgttgcattcttggctgagatgcgtcacccaatggacttctggaagggtttgttgtgcgcagacttgttcatctatttcgtttacatgttcttcggcatcttcgtctacagttaccagggacaattctcctacaacccagttatccagggcttgtcaccctataactggcaaacagccgcaaacatcatgaacttgatcacaggtttgattgccgcagtcttgtacggcaacatcggcatcaaggtcgcttatgttgacgtcttccaaggtatcttgaaggctcctccattgactagtaaaccgggtaagttgttgtggatcgcaatggttcccttctactgggctatcgcattcgttgtatgtgcagcaatcccgcaattctcttacatctccggattggttggtgcattgtgtatcttgcaattcacatatactttcccagctatcttgggtttcggttaccaaatccaaaaggacgctatgttgccaggtgaggagtccttcgacccacagaccgggacttacaactacatcgacagaggtgttaagagatggatcagaggcttcaaggttaactggttgttcaacatcttcaacttcttgtacttcttgggtgctttgacaacggctgctttgggaatctactcttcatgcttgggtttgatctccgctttcgacgggtcctctgctgccacaagcttcggttgtactccaccagtataa

SEQ ID NO: 398 - DNA, 1881 bp, Trypethelium eluteriae
atggctgttaatgccggaatcggtatggctgcagacccacgtttgtccatcgaggccgacgtggttggttcatacccgaacagagtgttgaggacattgcatgacccaaacgtgactttcgaggagtacttgcattacgctaagatcagtcgtgccgacgaggacagagtgtacggtccgagtagtgagtacgcagctaagaagcctggggttgtgggaagattggtacctggtacgcaaagtatgttgggtaggttcccaggtttgaacaaggagacaaagcaggacgtgtccatcgctcagagtgagcatggcacacaattgcaacatttcgacaaggagactttggagaacccagagttgagacgtaagagtttggtgagtccaaacggtgagacaggtaggcatagttctggggttgacacatccatgatcagtgagcaagagtggttgagcgctagtagagcagcacgtacagcaacctggggtgcagtgttctacttgatcactacagacatcttgggtcctttctcagttccatgggcaatgacacaattgggttggggtccaggggtctccttgtacacaatcttcggcgtcttggcagcttacagtggatggcaattgtggaagatgttcttggccttggactccgacagataccccatgaagaactacggtgacatcgctttcagaatctacgggaactgggcacgttacttcgtcaacgttttgcaatccttgcaattcttcttgaacgttggtttgttgatcttgagtaacggccagtctatcagtcaattgagcaagagtcatttgtgtttcatcgtgtgtttgttggtattcatgatcgcaggtttcatcgtcggacaaatcagaacattggccaagttcggatggttggcaaacatctccgtgtggatgaacatcttcatcatcatcgctacaatgggtatcgtagctcattcccagccgaactacgttgcttccggagcaagttacccagacttgttcaacaccttgccaaacggtgacccagacacagaccatcccgctccaatcatgacaactgcaggtagtgctccaggtttggccttcacagacaacgtgaacggtttgatgcaagccgttttctcttatggtggcgcaactttgttcaccgagttgatggccgagatgcgtaggccttgggacttctggaagggattgatctgtgcagacttgttgatcttctgctgttacttgttcttcggttgtttcgtctacggttaccagggtcagtacgcattcaacccagcctaccaggggatcgacccctacggctggcaaaccgtaggcaacgtattcggtgtaatcacaggtttgatcgcagcttgcttgtacggtaacatcggtatcaaggttttgtacgcaaacatcggcagagacttgttcaactggccagtattggagtccagaaagggtaagttgatcttcatccctttcgttccaatctactgggccttggcattcgttgtcactgttagtatccctcagttcagtaacttcagtgctttggtaggcgctgcctgtatcttgcaattcacatacacttttccacccatcttgttgttgggattcaaggctcaacatgacagtatcttgcctgaggagaagttcgaccctcaaacagggagagttgagagagttgacaacgggatgaagagatggatcagaggtttgagaaaggacgctttggtcaacttgtgggacttggtttacttcttgggagctgttgtgacagccatcttgggtatgtacagtgcaatcaagagtatggctgtgaactacaacagtaacccgaacttgacaggatggggttgtaacagtcccacgggttaa

SEQ ID NO: 399 - DNA, 1770 bp, Cladonia uncialis
atggctggtacgatgggaggtgctatgaacatggacggtggggaccctagaatgaactcaagcgctggtttgggtttcggagttgcctctgagatcactagacctgctgctcgtaagttgcatgaccctagcatcacgttcgaggagtacatgcactacgcagcaatcacgagggcagacgacagacatgtaaccatcccacagacagacactgccttgagtgttgcaggattgaagggtttgaaccctttcgcaaagaagagagagccggtagtcgagactgtgactcagttgaacgagaagacaacgtcatccagtagtccagacagacagccatacactatcacagaggaggagtacatccaagcctcaagagctgtgagaactgctacttggggagctgtattcttcttgatcactacagacatcttgggtccattcagtactgcttgggccttcagacaaatgggatatggacctggagctgttttgtacaccatcttcgctgctttcgctggttatgggggatacttgttgtggagaatgttcttgggattggacagtgacaagtatcctttgagaacgtacggcgacatcgccttcagagtttacggtcaaggggttcgtatcggtgtcaacttgttgcagaccttccaattgttgttcaacgttggaatcatcatcgttacaaacggtcagagtttgtctcaaatggctgctaaaggtcccaacttggaccaaaacggtgcttgtttcatcgttttgtgtttcgtttgggctatcgcagggatgttgttgggacaaatcagaactttggcaagattgggccacttggcaaacttcgcaatctggttgaacgtcatcgtaatcatcgctactatggccgtggtcgcacactcaaccccaaactacgtagctgccaacactgcctacagcatcaacccaggacctgttgtcacaacagcaggccctccagctggcgttggtttccaaggtcaaatcgttggtttgatgcaagccgtttactcctacggtggagccatgttgttcgtggagttcatggctgagatgaagagaccatgggacttctggaagggtatgttgtgtgcccagactttcatctacttcgtttacatgttgttcggcttgttcgtatactcctaccaaggtcagttcaccatcatcatcgcctaccagggtatcagttcttacgcatggcaaactgttgcaaacgccttcggtttgacgtctggtttgattgccgcattgttgtatggtaacatcggaatcaaggttgtgtacaacaacgttttgatggagttgttcagattcccatccttggctaccaaggcaggtaagttggcttgggtcggtgtagttcccgtctattgggctgttgctttcgttatcgcatctgcaatcccacaagttagtaacttgtctggattcatcgcagcattctgtatcttgcaattcagttacacgttcccacctttcttgcacatcggattccaaatccaaaaggctgctatccagtctggtgagggattcgacccagcaaccggtcagactgtgagacatgacaacggtgttaagaggtggatcagaggttacaagaaggacttcttgttgaacacattccacatgatcttcttcttgggttcattcgtcacggctgttttgggtgtttacagcgccatcgttggtatgatctcatcatacgcaacgggtgctactaccacattcagttgtaactctcctgttttgtaa

SEQ ID NO: 400 - DNA, 1821 bp, Mollisia sp
atgacttcaactgggggagcattcgcttcagagggaggtgaccccaggttgtcaagtgaccgtatcgaggagttgagcaacatgcgtccacagcaaagaaagttgcatgacagttctgttccattcgaggagtacatccattacgctgctatcacgagagcagaggaggacgccgacagcaagaacgacatcggagacactaccttcttctctttgatcgttccacctaagaatgccccaggtcagacaccagtctacacaacttctccgcaaacacctggtgactctaaggcaatcgaggtgggtagcgaccgtaagtcctcttcagagaacttgcataacttgtcatacgctgctagaagtggtgtgacagacgacgagtggacaaacgcttctagagctatgagaacagccacgtgggctgctgtcttctacttgatcacaacagacatcttgggtccattcggagtcccgttcgcaatgggtactatgggctggggtcctggtatcgctttgtacactgtgttcggtgggttggctgtatatggtggtttcttgttgtactacatgttcttgggcttggactcacaccaatatcccttgagaacttacggtgacatcgctttcagggtttacggtagaccggtgaggtacttgatctcaatcttgcaatccatccaattgttgttgaacgttggcgtcatcatcgtttccaacggtcaagccttgtctcaagtatccaagttcaagttgtgttacgctatctgttgtttggttttcgcattggctggcttcttcttgggtcagatcagaactttgcaaaagttcgggtggatggcaaacgcagctatctggatgaacgtcttggtaatcgttttgtccatgggcatcatcgcacatagtgcaccaaactatttggggatcgacgccagtgctggccaagctttgggaggtacattggttacagcagacgccaacggcaactttccccctatccaaactttcgctggtttgcctccctctactgcaggtttcacaggcgctttggtaggcttgatgcaggctgtatacgcattcggtggtgctatgttgttcgtagagttcatggccgagatgaggaagccacgtgacttctggaaggggatgatctgtgcccaagccttcatctacgtgatctatatgttctacggctgtttcatctatggataccaaggacaatacgctgttaacccgagttaccaaggagtgtcttcttacaactggcaaacagctgggaacgtgatcgcattcgtatctgccttgattgccgctggcttgtacggcaacatcggagtaaaggttttgtacaacaacgtattcacagacttcttcggtgctccacccttgaactcaagaactggtaagatcatctgggttgcagtcatcccagtttactggagtatcgcatacatcgtatcagccgctatcccaaacttcttcggattgacttcattggtctcagccttgtgcatcatccagttctcttactcatttcccccattcttgtacatcggttacttgaccagattgggtgccatgcaagagggagagggtttcaaccccgtgactggtgtagtaaccaggcatgacggtggcatcaagcgtttgatcagaggtttcttgaagagatggccgatgaacatctggaacaccatctatttcttgggtgctttggttacagctggattgggtgcttactcctccatcgaggctttgatcgcagctttcaaggttccagccatcacggctttcacttgtcattctcctttggacgcagcataa

SEQ ID NO: 401 - DNA, 1824 bp, Pseudeurotium bakeri
atggctgttaacatgagtaacttggctttggacggaggtgaccccaggttggacgacggaatcggtgaggggacaccgtcatacatcggtccccaaatcagaaaggctcatgactcttctgttgcattcgaggagtatcaatactacgctaagttgactagggcagaccaggacactttgtacggtccaaacgtaccagttcacttgggggttagcgtaagtgaggtctcaggtgtggactctagcccttctagtagtaagacttctccgcaaaagacacatgacggtaaccctttgagacacagaaaggacttgcatgacactgctcatacggacagagctggtgtcagttcagaggagtgggctatggcatcaagagccgttagaactgctacttggttgagtatcttctatttgatcactacagacatcttgggtcctttcggtgttgcattcgctatgggaaccttggggtggggacctggtatcgcattgtatactgcattcggtatcatggctgctttcggaggttggttgttgtacaggatgttcttgggcttggactcttatgagtaccccatgaagacatatggagacgtagctttcagagtttacggaccgactatgaggcatatggttaacatcatgcagaccatccaattgttgttcaacgtaggagctatcgttatctccaacggcatggccttgtctcaaatgtctcaattcaagttgtgttacgcaatctgttgtttgatctgggctgtctgtggtttcttcttgggacaggtgcgtactttgcaaaagtatggattcatcgcaactttcgccatcttcttgaacgtcttgttgatgttcatcaacatgggcgtcgtagctcatagtccacccaacttcttggctaccggaggttcagctgggcaggctttgggtggcttgagtgtcactgcagacgcttcaggattgtatccccctatcatcaccactgctggcttgcctgcttcaactgtcggtttcactggcggtatcgtaggtttgatgcaggctgtatacgcctacggtggggctatgttgttcatcgagttcatggctgagatgagaagacctagagacttctggaaggctatgatcttcgcacagttgttcatctacatctgctacatgttctacggttgcttcatctatggctaccagggtcagtacagcgtaaacccaagttaccaaggtgttagtccgtatgcttggcaaacggttggtaacgcaatcgcagtcgtgagcgctttgatcgcagctggtttgtatggaaacatcggtatcaaggtcttgtacaacaacttgttcgttgacttgttcaaggcacctccattgactagtaagaggggtaagttcttctgggctgttatcactccaatctactggaccatcgctttcatcatcagtgcagctatcccaaacttcttcgggttgacatctttggtagcagcattgtgtatcatgcagttctcctacaccttcccacccttgttgcatttgggattcgctatcaaggagggtgctatgttgcagggtgagggtttcaacccttctacaggtgaggttgtaaggcacgacacaggtatcaagaggtgggctagaggcttcttcaacggaggcttcagaggttggaaggtttacgtgaacttgttcaacatcttgttcttcttgggttctgctgccactgctggtttgggtgcttactcagcagtagaggcattgatcactgcattccagagtccacaaatcacagccttcacttgtacttctccattggcaccagtctcctcttaa

SEQ ID NO: 402 - DNA, 1758 bp, Acidomyces richmondensis
atggagtactccgagaagttgccagagcaaggcatgccacgtgacaacggtaagggctacgactctggtagcggtacggcaatccacccacagcaaagaagattgcatgaccccgacgtttcattccaggagtacgtgcattacgcttgtttgacgagacaggagcaagactccttgccgaagccacaacacggaaagaacttcttggcctacttgatcccaaacttgcaaaagttggagactgggatgttggaggcatcacatactacggtagacatcaacacgtcagacagggagcaacgtaagacgatctccgacgaggagtgggtcaacgcttctagagctttgaggactgctactgcaggtgccgtcttctacttgatcactacagacatcttgggtcctttcggtttgccgtacgctttcgctaccactggttggggaccaggtacagccttgtacacagtatttggggcaatggcaggtttcagtggctacttgttgtgggactgtttcatgggtttggactcttaccaattccctatcaaggctttcggcgacatcggtttccgtgtatacggtacgtggtgcagatacttgttcaacatcttgcaagcagtgcaattgatctgtaacgttggtgccatcatcatcagtaacggagaggctttgagtgaggctgcaaagttcaagttgtgctacgccatctgttgtttggtttgggccttggctggattcatcttgggtcaaatcagaactttgcaaaagttcggttggttggcaaacgtggccgttttcatcaacttgacaatcatgttcatcacaatgggtgctgctgctcattccccaccattgtactcagccgcacaacaatctgctggagcctccatcagtagtacattgatcacaccagtaaacgggaagtatccgcctgtgcagcattcaaacggattgccttcatcaggttcctttgctggcaccttgaatggcgcaatgcaagctgtttactcatacggtggctctatgatcttcccagagttcatggcagagatgagaagaccgagagacttcttgaagggtatgtggggtgcacagatcttcatctacatctgctacatgttgtacggcttgttcatctacgggtaccaaggtcagtacgtgcaaacaccagcctacttgggcatcagttcctacggcttgcagaccgctggtaactctttggctatcgtcagcgccttgatcgcagccgctttgtacggaaacatcggtatcaaggttttgtacaacaacatcttggtggagttcttcaaggcaccccctttgaactcaaaggtcggcaagatgttgtggatcggtttggttccattgtactggagtgttgcctacgtgatggctgctgctatcccagacttcgctggcttcactggtatcgtagcagcagcttgtatcttgcaattcacgtacacattcccacccttgttgcacgttggttactccatccagaaggcagcaatgaggtctgagccaggtttcgagcaatctactggagaggttgttacattggaccgtggtatcaagaggtggatcagaggtttcttctccgggagatggtacttgaacatcttcaacgttttgtacttcttggcagccatggctttgtgtgcattgggatgctacggtgctatcgagaacttgatctacgcttactcaatcccacaattgaacgccttcggttgtaccagtccattggacacctaa

SEQ ID NO: 403 - DNA, 1737 bp, Hamigera striata
atgaacactaaggaggacttcaacccaaaggcaacagagccgaccgtcatcaacggctcattcggtccaatcagaccgcaaatgcgtttgttgcatgacccagacgtttctttcgacgagtactactactatgctcagcaaacaagagaggaggaggagagggcacctgttcccccaaagaaggctggtggcttcttgaactatttcatcccaaacatccaaggtgaggagaacgacgacgaggccagggttgacatcaacttgtcagacttggcaacaagagccggtatcacagacgaggagtggacgaacgccagtagggctgttagaacggctactgctggtgcagtcttctacttgatcactacggacatcttgggtccattcggtttgccatacgctttcgctacaacggggtggggtccaggcgtcgctttgttcacagttttcggaatcatggctggattcagtgggtggttgttgtggcattgtttcatgggtttggactcttaccaattcccagtgaagtcttatggtgacttggcattcagattgtatggtccttgggctcgtcacggcttcaacgtattgcaatccatccaattggtttgttctgtaggggctatcatcatctcaaacggtcaggccttgtccgaggcatcaaagttcaagttgtgttacgcaatctgttgcttggtctgggccttggctggattcgttttgggccagatcagaacattggagaagttcggttggttggcaaacttcgctatctacatcaacttgttgatcatgttcatctcaatgggagcttctgcacatactccaccgttgtactcagcagcagcttcaagtgctggttattccgtaaacatcgctacagtcaccccagacgcaaacaacgtatacccacccgtgcagcattctgctggcttgccagacccaagtaacttcggagcatcagtaaccggcttgatgcaggctgtttatgcatacggtggtgctatgatcttcactgagttcatggcagagatgaggcgtccaagggacttcttgaaggggatgtggggtgcacaattgttcatctacttgtgctacatgttgtacgggttgttcatgtacgcttatcaaggtcagtatacgttgaacccatcctacttgggaatctcagactacggcttgcagactgccggtaacgttttggcaatggttagtgctttgatcgctgcagccttgtacggtaacatcggtgttaaggtaatctataacagcatcttggtggagttcttcaaggctccgcctttgacgaacaggagggcaaagttctactggatggccttgatccctgtttactggtcaatcgcttacgtaatcggagctgccatcccggacttctcaggtttcacagcaatcgtttctgccgtttgtatcttgcaattcacttacactttccctcctatcttgcatttggctttcaacatccgtaagaacgcaatgttgccaggtgagggattcgacccattgactggtgagatcactcatcatgactcaggtatcagaagggttatcagagggttctgtgctaagcattggtggatgaacgcctggaacgtaatctatttcttgggtgctggcgcaactgccggattgggaatctgggctgcagttgagaacttgatcttgatctacgcagagccggagttgaacgctttcggttgtcatagtccgttgcaataa

SEQ ID NO: 404 - DNA, 1785 bp, Phaeoacremonium scolyti
atggctaaaccagggaacatggctatcgatggcgcagacccgagggtattcggtcagatggacagtggtgccgaagcccctgttgggagtatcagtactgtcaagccacaacacagaaagccattcgacccgaacgtgagtttcgaggagtactattactatgcacaacagaccagagccgcagaggctcagcaaccaaagaccaacttcgagacgtctgtctggagtgtcatcttcccaagtaagtctggtcctggagttgctgctgccagtgacagtgacaacactgaggagaagaagaccgagacgagaccccatgacagagttatcgtgagtgacgacgagtgggcaaacgctagtagggctttgagaactgctacgagaggtgctgttttctacttgatcactacagacatcttgggtccattcggcttgccatacgcattcgctacaatgggttggggacctggagtggcattgtatactgtttttgctgccttggcaggttacagtggttacttgttgtgggagatcttcttgggattggacagttaccagtaccctgttcgtagcttcggcgacttgggttatagattgtatggtagatggatcagatacttgttcaacttcttgcaagctatccagttgttgttgaacgtcggattgatcgttatcagtaacggagaggctttgagtcaggcaacgaagttcaagttgtgtttctgcatctgttgtttgatctgggctttggttggattcgttgtcggtcaaatcagaactttgcagaagttcggttggttggcaaacgcagctgtttggatcaacttgatctgtatgttcatcaccatgggtgcagctgcacacacccctccaaactacgcaggtgccagtcaatctgctggcaacgttatcgacaatggggctttgatcactccggacgcacaaggaaacttccctcctgttcaaacctctggtggcttgccaaacaccggaggtttcatcggtagtgtctctggtgccatgcaagcaatcttcgcatatggtggaagtatgatcttcccggagttcatggcagagatgaagagaccaaaggacttcttgaccgcaatgtgggctgcacaagctttcatctacttctggtatatgttctacggcttgttcatgtacggttatcaaggccagtattctatcaacccctcctatttgggtatcagtaagtacagtttgcaaactgccggtaacgtcttcgctatggtttctgccgtaattgctgccgctttgtacggaaacatcggtatcaaggtaatctacaacaacgtcttggtcgagatcttgcacgctccacctttgacaacaagagctggtaagatcgcttgggctggcttgatcccaatctactgggctatcgcattcgctttggctgctggtatcccaaacttcgctggattgacatctgtcgtggctgcattctgtatcttgcacttcacttacacattcccacccttgttgtctatcggcttcgttatcaagaagttggctatgttggacggtgagggtttcgacccagccactgggcaagtcaacaggagagacaacggcttgcgtagatggagtaggggcttcttggctaagaggtggtggttcaacatcttgaacttcttgtacatgttgggtgctttggctttgggtggcttgggtgcttacagtagtatcgagatcttgaaggacgctttcaagaccaacactacaacatcttacgtctgtaagtctccattggagggataa

SEQ ID NO: 405 - DNA, 1800 bp, Ophiostoma quercus
atggagaaccgtgcctctgtaagtccaaacggcgacggtacggtgttgaaccctcccgcatatgagactgtgggtgaggacatccagggtatcgtaagacctcagcatagacccatccatgaccctagggtgactttcgaggagtacttgtactatgctaagcaaacacgtttggaggaggagaagcaacccgtcactggttatgaggccactttctggtctttggtattcccttccaagagtgacgcaggtgtccaaccagctgctaagatcgagacagaagccgctgccgagaagacagccaacacgggacgtaagaacagtgctgcaatcagtgacgaggagtgggcaaacgctagtagggctttgagaactgctacgagaggtgctgttttctacttgatcactacagacatcttgggtccattcggcttgccatacgcaatcgctacaatgggttggggacctggagtggcattgttcactgtttttgctggcttggcaatctacagtggtttcttgttgtgggacacgttcatgggattggacagttaccagtaccctatccgtagcttcggcgacttgggttatagattgtatggtccttggatgagatacttgatcaactctttgcaaagtatccagttgttgttgaacgtaggattgatcgttatcagtaacggagaggctttgagtcaggtcgccaagttcaagttgtgtttcgtcgtgtgttgtttggtctgggctatcgttggattcatcgtaggtcaagttagaactttgcagaagttcggttggttggcaaacgcagctgtttggatcaacttgatctgtatgttcatcaccatgggtggagctgcacactctcctccaaactacgcaggtgccggttcttctgctggcgcaacaatctcaggtgggagtttggtgaccccgaacgcagagggagtataccctgcagttcaaacctctggtggcatcccagacaccggaggtttcatcggtagtgtatctggtgccatgcaagcaatcttcgcatatggtggaagtatggttttcccggagttcatggcagagatgaagagaccaaaggacttcttgaccgcaatgtgggctgcacaagctttcatctacttctggtatatgttctacggcttgttcatctacggttatcaaggccagtataccatcaacccctcctatttgggtatcagtaactacggtatccaaactgccggtaacgtattcgctatgttgtctgccgtcattgctgccgctttgtacggaaacatcggtatcaaggtcttgtacaacaacatcttggtagagatgttccacgctccacctttgacaacaagaagtggtaagttcttctgggttgccttgatcccagtttactgggctatcgcattcgttttggctgctggtatcccaaacttcagtggattgacatctgtagtggctgcattctgtatcttgcacttcacttacacattcccacccttgttgtctatcgccttcagtgctaagaagttcgctttgttgccaaacgagggtttcaacccagccactgggttcgtattccatgagttgccagctggcgacactagattcaagaggttgtgtagaggtttcatgagtcgtgagcgttggtggttgaacatcatcaacgtgttgtacgttttgggtgcattggccttggctggtttgggtgcttacgcttctatcatgactttgagggacgctttcaagagtaacagaactacgtcttacgtttgcaagtccccattggacggttaa

SEQ ID NO: 406 - DNA, 1809 bp, Talaromyces variabilis
atggctcaaccagcctccacaatgttggatggcggagacccgaggttgaacgagaaggagcgtgacttggccgatgccgcagaggccagaagtggagttagacctcaacatcgttctttgtacgacagtagcgttacgttcgaggagtaccactattacgcacaattgacgagggctgaggaggacaactatccagaccatgacaaggagagagggtggttgtctgtaatcttcccgtctaagagcgacggtggagtcacacaaactagcgacggtgactctgagccaaaggacgcttcaggcttgaacacaagtaaccctgaggttagacacgttatctcagacgaggagtgggcaaacgcatctcgtgcattgagaacggctactagaggtgctatcttctacttgatcacgacggacatcttgggtcccttcggtttgccttacgctttcgggactatgggatggggaccgggagtagcattgttcacagtgttcgctggcttggctatctactctggctatttgttgtggcaaactttcttgggtttggacagttaccaataccccgtgaggcacttcggcgacttgggaatgaggttgtacggtccatggttgcgttacttgttcaacatcttgcaaagcatccagttgttgttgaacgtgggtttgatcgtaatctccaacggtgaggctttgtcccaggttgctaagttcaagttgtgcttcatcgtatgttgcttgatctgggctatcgttggtttcatcttgggtcaaatcagaaccttgcagaagttcggatggatcgcaaacgctgcagtttggttgaacttgatctgtatgttcatcactatgggtgcagccgcaaaccaagacccaaactataacgcagcatcccaagccgcaggttcagtcatcgacggtggtgtgttggtgcagcaagacgcacaaggtaactggcctcctgtcaccacgagtggcggtttgcccgtatcagacggtttcgctggttccgttagtggtgctatgcaagctgtattcgcttatggtggctcaatggtgttccctgagttcatggctgagatgaagaggcccaaggacttcttcacggccatgttcgctgctcagatgttcatctatatctggtacatgttctacggcttgttcatgtatggttatcagggccagtatactgtgaacccgtcctacttgggagtttctggttacggattgcagacagctggaaacgttttcgctatgttgtccgctgccatcgctgccgctttgtacggtaacatcggagtcaaggttttgtataacaacatcttcgtcgagatcttcagattgcctcctttgacaacaaagggtggaaagatcgcttgggtagccttgatcccaatctactgggcaatcgctttcatcgttgctgctgcaatcccaaacttctctggattgacaagcgttgtagctgctttctgtatcttgcatttcacatatacattcccacctttgttgagtttggctttctgggtcaagaagcatgctatgcaagagggtgagggcttcaacccagactctggagagacagttagacatgacagtgggttcagaagagtaatgaggggtttcttcttccctggtttcatcagttcaaagttcttctacttctcagccttcaacatcatctacttctttggggctttggctttggctggtttgggtgcatattcagctatcgaggtcttgatcgacgcatacgcatctagcgtcactacaagtttcacgtgtaagtctccagttcaatcataa

SEQ ID NO: 407 - DNA, 1815 bp, Talaromyces sp
atggctcaaccagccagtgtattgggtgacaggggagacccgaggttgcatgagaaggagcgtgacttcgccgacgccttggaggccagagaggcaagagaggtcagagaggccagaagaggtatcagaccgcaacacagagtattgcatgacagctctgtcaccttcgaggagtacaactactacgctcagttggctagagcagaggaggacacgtacaacgaccatgacaaggagagaggttggttgtctttgttgatcccatctaagagtgacggagctgagttgaaggacgctgcaaacatcaacacatccgacaaggctgttacagccactatcacagacgacgagtggacaaacgcatctcgtgcattgagaacggctactagaggtgctatcttctacttgatcacgacggacatcttgggtcccttcggtttgccttacgctttcgggactatgggatggggaccgggaatcgcattgtacacagtgttcgctggcttggctatctactctggctatttgttgtgggacatgttcatgggtttggactccttccattaccccatcaggcacttcggcgacttgggattcaggttgttcggtccatggatgcgttacttgatcaacatcttgcaaagcatccagttgatcttgaacgtgggtttgatcgtaatcagtaacggtgaggctttgagtcaggttgctaagttcaagttgtgcttcatcgtatgttgcttgatctgggctatcgttggtttcttggttggtcaaatcagaaccttgcagaagttcggatggatcgcaaacttggcagtttggatcaacttgatctgtatgttcatcactatgggtggtgcctcccattacggtccaaactatgactcagtcggatcagccgcaggtgctgtcatcaacggtggtgtgtccgtgacccaattgccagacggttcatggcctcctgtccagacgtctggcggtttgccccattcagacaacttcgctggtacaatctccggtgctatgcaagctgtattcgcttacggtggcgctatggtgttccctgagttcatggctgagatgaagaggcccaaggacttcttgacggggatgtgggctgctcagttgttcatctatttctggtacatgttctacggcttgttcatgtatggttatcagggccaatatgctgccaacccgagttacttgggaatctcttcatacggaatccagacagctggaaacgttttcgctttcttgagtgctgtgatcgctgccgctttgtacggtaacatcggagtcaaggttttgtataactccatcttcgtcgagttgttcagattcccacctttgacaacaaagggtggaaagatctcttgggtaatcttgatcccaatctactggtcattggctttcatcatcgctgctgcaatcccaaacttctctggattgacaagcgttgtagctgctttctgtatcttgcatttcacatacacattcccacctttgttcgccgttgtttactgggcaaagaagttcgctttgcaagagggtgagggcttccagccagagtctggagaggtagttagacatgactccgggttcagaagattcatgaggggtttcttcttccctggtttcgcaacgtcaaagtacttctacttgtcagtgttcaacatcttgtacatgttgggtgctttggctttggctggtttgggtgcatatgcttctatcgtcacattgaaggacgcatacgcaactagcgtcactacatccttcacgtgtcattctccagttgagccttcctcttaa

SEQ ID NO: 408 - DNA, 1806 bp, Talaromyces calidicanius
atggctcaaccagccagtttgatgtcagatggcggagacccgaggttgcatgagaaggagcgtgacttcgccgacgccttggaggccagagaggtcagagaggcaagaggtggcatcagaccacaacaccgtagattgcatgacacatctgtgacgttcgaggagtacaactactacgcccaattggctagggcagaggaggacacatatacagaccacgacaaggagagaggttggttgtctttggtcatccctagtaagtctcatggggcagagttgaagaacgctgccaacatcaacacctcagacaaggccgtcgtcgcaaacatcacggacgacgagtggacaaacgcttcaagagcattgcgtacagctactcgtggtgctatcttctacttgatcacaacagacatcttgggtccattcggcttgccatacgcattcggtactatggggtggggtcctggaatcgccttgtacaccgttttcgcaggcttggctatctactctggttacttgttgtgggacatgttcatgggtttggactcattccattacccaatcagacacttcggagacttgggcttcaggttgtttggcccatggatgagatacttgatcaacatcttgcaatcaatccaattgatcttgaacgtaggtttgatcgttatcagtaacggtgaggctttgtcccaagtaagtcagttcaagttgtgcttcatcgtatgctgtttgatctgggccatcgttggtttcttggttggtcaaatcagaactttgcaaaagttcggctggatcgcaaacttggcagtttggatcaacttgatctgcatgttcatcacaatgggtggtgcagctcattatcctccaaactacgctggatctggcgcaagtgcaggtgccatcatcaatggtggggtgtctatcacgcagttgccagacggtagtttcccacctgtccaaacatctggtgggttgccccattcagacaacttcgctggtactatctcaggagctatgcaagctgtattcgcttatggcggtagtatggtgttcccagagttcatggctgagatgaagagaccaaaggacttcttgacaggaatgtgggctgctcaggttttcatctacttctggtatatgttctacggtttgttcatctacggttaccagggtcagtatgcagtaaacccatcctacttgggaatctctagttacggtatccaaacagctggcaacgttttcgccttcttgtcagcagtaatcgctgctgccttgtatggtaacatcggtgttaaggtcttgtataactccatcttcgtggagttcttccatttcccaccattgactacaaagggaggtaagatcagttgggtaatcttgatcccgatctactggtcaatcgctttcgtaatcgcagccgctatcccaaactttggcggtttgacttcagtcgttgccgctttctgtatcttgcatttcacgtacacttttcccccattgttcgcagtagtctattgggctaagaagttcgccttgcaagagggagagggtttccaacccgagaacggtgaggttgtcagacatgactcaggtttcaggcgtttcacaagaggattcttcttcccaggtttcgcaacttccaagtatttctacttgtctgtcttcaacatcttgtacttcttgggtgcaatggccttggctggtttgggtgcttacgctagtatcgttactttgcaagcagctttcgctagttctacaactacgagtttcacatgccatagcccattggactcttcttcttaa

SEQ ID NO: 409 - DNA, 1818 bp, Rasamsonia argillacea
atggctcaaccagggtccttgatgttggacaggggagacccgaggttgcatgagaaggagcgtgaccaacaggacgccatcgacttgggtcaccctccacaatactcaggtggcgttagaccacaacaccgtaagttgcatgacccagacgtgacgttcgaggagtactactattacgcccaattgactagggcagaggaggacagaaacagaagccacgacggtgagagatcattgttgtctatcatcttcccttccaagtctgctgggggagtaaagcaagtgactgagaacgttgagaaggacgtgacaaccatcaacacttcagatccggctcaaagattgacaatcacagacgaggagtggacgaacgcttctcgtgctttgagaactgctacaagaggagctatcttctatttgatcacaaccgacatcttgggacctttcggtttgccgtacgctttcgcaacaatgggatggggaccaggtgtcgccttgtacaccgttttcgctggtttggctgggtactctgggtacttgttgtgggacgctttcatgggtttggacagttatcaattccctttgagaaacttcggcgacatgggattcagattgtgtgggccatggatgagatacttgttcaacttcttgcagtccatccaattgatcttgaacgtaggtttgatcgttatctcaaacggagaggctttgtcccaggctacaaagttccaattgtgtttcatcgtttgttgtttgatctgggcattgatcggtttcgttttcggccaggtgagaactttgcaaaagttcggttggttggcaaacatggccgtttggttgaacttgatctgtatgttcatcaccatgggagcagctgctcatactcccccaaactaccaagccgcatcacaaagtgctggggctgttatcgaaggtggcgcattgatcacaccaatcgagccaggtgtctatccacccgtgcaaactagtggaggtttgccaaacgctggtggattcagtggttcagtctctggtgcaatgcaagcaatcttcgcttatgggggttcaatggtattcccagagttcttggcagagatgaagaggcctcgtgacttcttgcaagctatgtgggcagcccaggccttcatctacttctggtatatgttctacgggttgttcatgtacggatatcaaggccagtattccatcaacccttcttacttgggtatcagcgagtacaagttgcagactgctggtaacgtcttcgctatggtgtctgccgctatcgctgcagctttgtacggcaacatcggcgtcaaggtgatctacaacaacatcttcgtagagttcttcagagctccaccattgacaactagggctggcaagtgggtatgggttttcatcatccctgtctactgggccttggctttcatcatcgcagctgcaatcccaaacttcagcggtttgacttctgtcgtagcagccttctgtatcttgcaattcacatacacatttcccccaatgttgtcagtcgcctactgggttaagagaaacgctatgcaggctggggaggggttcgacccaacaactggtcaaactacccgtcatgactcaggattcaggagattcttgaggggtttcttctttcccggatggtacgcaaacaagagattctacatcaacgttttcaacatcttgtacactttgggtgccttgtgtttggcagggttgggtgcttactccgctatcgaggtcttgatcaacgccttccaatcaagtgtcacgacttctttcgtttgtaagtcacccttggagtaa

SEQ ID NO: 410 - DNA, 1818 bp, Byssochlamys spectabilis
atggctcaaccagcctccttggctttggatggcggagacccgaggttgcatgagaaggagcgtgagactttggacgccatcgactatggtgtcgcaacttcacagggtgttagtatctctccacaacaccgtaagttgcatgacccagacgtgacgttcgaggagtactactattacgcccaattgactagggcagaggaggaccaacacgctgcctccgaggagacattgaaggagaagggtttcttgtctatcttgttcccaactaaggacgacggaggtatccaacaggtctcaaacaacgctacgagagacgcatccaagatgaacacgtcaaacgctgctacaaggatgacaatcaccgacgaggagtggacaaacgcttcaagagctttgagaactgcaactagaggtgccgttttctacttgatcactacagacatcttgggtcctttcggtttgccttatgcattcgcatccatgggttggggaccaggcgttgcattgttcacagttttcgctgggttggctgggtactctggctatttgttgtgggagtctttcttgggcttggacagttaccagttccccgtacgtagtttcggagacttgggtttccgtttgtatggcccatggatcagacacttgttcaacatcttgcaaagtatccaattgttgttgaacgttggtttgatcgtcatcagcaacggtgaggccttgtcccaagccgctaagttcaagttgtgtttcatcatctgttgtttgatctgggctttggttggattcttcttgggtcaagtaagaacgttgcaaaagttcggttggttggccaacgctgctgtatggatcaacatcgtttgtatgatcatcaccatgggtggagctgcccatacccctccaaactacacagctgccagccagtctgctggggcaagcatcgacggtggaatcttgatcacaccacaaaacggcgtgtttcccccagttaccacatcaggtggtttgccaaactccggtggcttcactggctctgtttctggcgctatgcaagccgttttcagctacggtggtgcaatggttttcccagagttcatggctgagatgaagcgtccgaaggacttcttgacggctatgtggggtgcccaggcattcatctacttcgtatacatgttctacggcttgttcatgtatggttatcaagggcaatacgttgtaaacccatcatacttggggatctcaaagtacagcatccaaactgcaggcaacgtattcgccatggtgtcagcagctatcgctgccgcattgtatggtaacatcggaatcaaggtaatctacaacactatcttcgttgagttgttgaaggctccacctttgaccactagggcagggaagttggcttgggctggtttgatcccagtctattggggtatcgcattcgtcgttgcagctggaatcccaaacttctccggtttgacctccgtcgtggctgctttctgcatcttgcaattcacatacaccttcccaccattgttggccactgcttactggatcaagagagcagcattgcgtgacggggagggattcaacccaactactggcgagacgatcagacaagacagtggaatcaagagattgttcagaggcttcgccaacatggagaagaagactttgttgatgtctatgttcaacatcttgtatttcttcggtgctttggttttggctggattgggtgcttactccgcaatcgaggtattgatctcagctttcaaggagtcacgtgcaacgtctttcgtttgtaagtctcctttggacggttaa

SEQ ID NO: 411 - DNA, 1797 bp, Penicillium rolfsii
atggctcaattggggtccttggctttggatggcggagacccgaggttgcatacaaaggagcacgagaagatcgacatcttggctgcctctgagacatctacagcaatcccaccccaacatagatccttgcacgacagctcagtaacattcgaggagtaccactactacgcccagaagacgagagctgaggaggacactatgggtggacgtgagacgggatggttgtccttgatcttcccatctaagtccgacggaggagttcaacaaacgaccacaaacgttagcaaggacgcatctacaatcaactatacaagtaaggagaacagaatgacgatcacagacgacgagtggacaaacgctagtagagccttgagaactgccactagaggtgctatcttctacttgatcacaacggacatcttgggtcccttcggtttgccttacgctttcgcaacgatgggttggggacctgggatcgcattgtacactgtctttgccggtttggctggttactctggttacttgttgtgggtgactttcttgggcttggactcctaccaattcccattgcgttccttcggtgacttgggcttccgtttgtacggaccatggatgaggcacttgttcaacatcttgcaatctatccagttgttgttgaacgtaggcttgatcgtcatctcaaacggtgaggcattgagtcaagccgctaagttcaagttgtgtttcatcatctgttgtttggtgtgggctttggcaggtttcatcttgggtcaagttagaacattgcagaagttcggttggttggccaacgttgctgtctggttgaacttgatctgtatgttcatcactatgggaggtgcagccaactaccctccaaactatgctggcgcatcccaagctgccggagctacattgggggacggttctagcgtcgtggcagtaaacggagtataccctcctgttatgacctctggtggcttgccatctaccggatcattcgctggtacagtatccggtgccatgcaagcagttttcgcatacggtggatcaatgatcttcccggagttcatggcagagatgaagagaccaaaggacttcttgaccggtatgtgggctgcacaagctttcatctacatctgctatatgttctacggcttgttcatctacggttatcaaggccagtacaccatcaaccccacctatttgggtatctccaagtactcaatccaaactgccggtaacgtattcgctatggttacagccatcattgctgccggtttgtacggaaacatcggtgtgaaggtcatctacaacaacgtattggtagagttgttccgtttcccacctttgacaaacaaggctggtaagttcttgtgggttgccttgatcccagtttactgggctatcgcattcgttttggctgctggtatcccaaacttctctggattgacatccgtagtggctgcattctgtatcttgcaattcacttacacattcccacccatgttggcaacattgtactggatcaaggaagccgctatgcaagacggtgagggtttcgacccaacgactgggcaaacagttaggcatgacagaggcatcaagagattcatcaggggcttcatggctcaaaagcctaagtacttgatgttctctgttttcaacatcttctatatgttgggtgctttggcattggctggtttgggtgcttattcagctatcacagtgttgacagacgcattcgctcattcaaccacaaactctttcgtctgtaagagtcctttggacgaggcttaa

SEQ ID NO: 412 - DNA, 1794 bp, Penicillium limosum
atgtctcaattggggagtttggctttggatggcggagacccgaggttgcatgcaaaggagcgtgagaagatcgacgtgttggctgccaacgagatgactacagcaactagaccccaacatagaaagttgcacgacacgaacgtaacattcgaggagtaccactactacgccttgcaaacgagagctgaggaggacaactttggcggacgtgagacgggatggttcagtgtaatcttcccatctaagagtgacggaggagttaagcaaacgaccacaaacgttagcaaggacgcatctgctgtgaactattcaaaccatgcaaacagaatgacgatcacagacgaggagtggacaaacgcttccagagccttgagaactgccactagaggtgctatcttctacttgatcacaacggacatcttgggtcccttcggtttgccttacgctttcgcaacgatgggttggggacctgggatcgcattgtacactgtctttgccggtttggctggttactctggttacttgttgtgggagactttcttgggcttggacagttaccaattcccattgcgtagtttcggtgacatgggcttccgtgtctacggaccatggatgaggcacttgttcaacatcttgcaatctatccagttgttgttgaacgtaggcttgatcgtcatctcaaacggtgaggcattgtcccaagccgctaagttcaagttgtgtttcatcatctgttgtttggtgtgggctttggtaggtttcttcttgggtcaagttagaacattgcagaagttcggttggttggccaacgttgctgtctggttgaacttgacttgtatgttcatcactatgggaggtgcagcccactcacctccaaactatgctggcgcaagtcaagctgccggagctacaatcggggacggttctagcgtcgtggcagtaaacggagtattccctcctgttacaaccagtggtggcttgccatctaccggagcattcgctggtacagtaagtggtgccatgcaagcagttttcgcatacggtggatcaatgatcttcccggagttcatggcagagatgaagagaccaaaggacttcttgaccgcaatgtgggctgcacaagctttcatctacgtgtgctatatgttctacggcttgttcatctacggttatcaaggccagtacaccatcaacccctcctatttgggtatcagtaagtactcaatccaaactgccggtaacgtattcgctatggttacagccatcattgctgccggtttgtacggaaacatcggtgtgaaggtcatctacaacaacatcttggtagagttgttccgtttcccacctttgacaaacaaggctggtaagttcttgtgggttgccttgatcccagtttactgggctatcgcattcgttttggctgctggtatcccaaacttctctggattgacaagtgtagtggctgcattctgtatcttgcaattcacttacacattcccacccatgttggcaacatactactggatcaagcaagccgctatgcaagacggtgagggtttcgacccaacgactgggaacacagttaggcatgacaagggcttcaagagaatcgtaaggggcttcatggctcaaaagcctaagtacttgatgttctctatcttcaacatcttctacactttgggtgctttggcattggctggtttgggtgcttactcagctatcacagtgttgatcaacgcatacgcaaacaacatcactacatctttcgtctgtaagtcccctttggacggttaa

SEQ ID NO: 413 - DNA, 1794 bp, Penicillium simplicissimum
atgagtcaattggggtccttggctttggatggcggagacccgaggttgcatacaaaggagcgtgagaagatcgacgtgttgaaggccaacgagatcagtagtggcactagaccccaacatagaaacttgcacgacccgagtgtaacattcgaggagtatcaccactacgcccagttgacgagagctgaggaggacagttttggcggacgtgagacgggaatcttgtccatcttcttcccaagtaagtccgacggaggagttcaacaaatgaccagtaacgtttcaagagacgcaagtgctatcaactacagtgacaaggcaaacagaatgacgatcacagacgaggagtggagtaacgcttccagagccttgagaactgccactagaggtgctatcttctacttgatcacaacggacatcttgggtcccttcggtttgccttacgctttcgcaacgatgggttggggacctgggatcgcattgtacactgtctttgccggtttggctggttacagtggttacttgttgtgggtgactttcatcggcttggactcctaccaattcccattgcgttccttcggtgacatcggcttccgtttgtacggaccatggttgaggcacttgttcaacatcttgcaaagtatccagttgttgttgaacgtaggcttgatcgtcatcagtaacggtgaggcattgtcccaagccgctaagttcaagttgtgtttcatcatctgttgtttggtgtgggctttggcaggtttcttcttgggtcaaatcagaacattgcagaagttcggttggttggccaacttggctgtctggttgaacttgacttgtatgttcgtcactatgggaggtgcagcccacagtcctccaaactatgctggcgcatcccaaagtgccggagctacaatcggggacggtagttcagtcgtgcctgtaaacggagtataccctcctgttatgaccagtggtggcttgccaagtaccggaaacttcgctggtacagtatccggtgccatgcaagcagttttcgcatacggtggaagtatgatcttcccggagttcatggcagagatgaagagaccaaaggacttcttgaccgcaatgtgggctgcacaagctttcatctacatctgctacatgttctacggcttgttcatctacggttaccaaggccagtacaccgtcaaccccacttacttgggtatctccaagtacagtatccaaactgccggtaacgtattcgctatgatcacaggcttgattgctgccggtttgtacggaaacatcggtgtgaaggtcatctacaacaacatcttcgtagagttgttccgttgtccacctttgacaaacaaggctggtaagttcttgtgggttgccttgatcccatgttactgggctatcgcattcgttttggctgctggtatcccaaacttcagtggattgacatccgtagtggctgcattctgtatcttgcacttcacttacacattcccacccatgttggcaacatactactggatcaaggaagccgctatgcaagacggtgagggtttcgacccagccactgggaacacagttaggcatgacagtggcatgaagagattgatcaggggcttcatgagtttgaaggcaagatacaagatcttcagtatcttcaacatcttctacttcttgggtgctttggcattggctggtttgggtgcttacagtgctatcacagtgttgatcgacgcatacgcaaacaacaccactacaagtttcgtctgtcattctcctttggacggttaa

SEQ ID NO: 414 - DNA, 1803 bp, Penicillium parviverrucosum
atggctcaattggggaacttggctttggacggccaagacccgaggttgtaccatgacaaggagaacgagaagacagtggacttgcctccagagtactcttcaggcgctatccgtccacaacataggaagttgcatgacactagagttactttcgaggagtactattactatgccaagcgtacaagagctgaggaggactctttgcctcgtccagagaaggagtctggaatcttgagcatcatcttcccttctaagtccgacggtggtgtgaagcaagagactgagaacgtgtccagagacgccacagccatgaacacatccgacccagcaaacagaatgactatctcagacgaggagtgggcaaacgcctcaagagctttgagaactgcttctagaggagctatcttctacttgatcactacagacatcttgggtccattcggattgccatacgccttcgctacaatgggatggggacctggagttgctttgtataccgttttcgctggtttggctggttacagcggatggttgttgtgggagaccttcttgggattggactcctaccagttccctttgcatagtttcggcgacttggccttcagattgtacggtaggccgttgaggtatttgttcaacgttttgcagagtatccaattgatcttgaacgttggattgatcgtcatctcaaacggtgaggcattgtctcaagcaacgaagttcaagttgtgtttcatcatctgctgtttgatctgggctttggtaggtttcttcttgggtcaaatccgtaccttgcaaaagttcgggtggttggcaaacgctgctgtctggttcaacttgatctgcatgttcatcactatgggtggcgcagcacattctcctcccaactacgcaggagctagtcaagctgctggtgccaacatcggtgacggcagctccgtacaacctgtaaacggagtataccctcccgtcgtgacgaccggtggtttgccagacccatcagacttcgctgcatctgtctctggtgcaatgcaagcaatcttcgcatatggcggtgctatggttttcccagagttcatggctgagatgaagaggccaaaggacttcttgacgggtatgtgggctgcccaagcattcatctatttctgttacatgttgtatggattgttcatctacggctatcagggacagtacaccatcaaccctacttacttgggtatctcaaagtacagcatccaaacagcagggaacgttttcgcaatgttgtcagccttgattgccgctggattgtacggtaacatcggcttgaaggtcttgtacaacaacgtaatggtagagatcttcaggtgtcctcctttgacaactagagcaggtaagtggatgtggttcggtttgatcccagtttactgggcaatcgcattcatcatcgctgcaggaatcccaaacttctcaggattgacgtctgtagtttctgccttctgcatcttgcatttcacctacaccttccctcctttgttggctactttgttctggatcaaggaggctgcaatcggtgacggtgagggtttcgatccggctacaggtaacactgttagacacgaccgtggtgctaagaggttgttgagaggtttcttggcacaaggccctaagagaatgatcttctcaatctgtaacgttttctacttcttgggtgccttggctttggctggtttgggtgcttactccgccatcacttcattgatgtcagcataccaaaagtcagttacgacatctttcacctgcacgtctccattggacggttaa

SEQ ID NO: 415 - DNA, 1797 bp, Penicillium sclerotiorum
atgtctcaattggccagtttggctgttgacggcgacccacgtttgcacgagaaggagagagaggctatcgacaacttgtcagttgcctctcccggaggtggtgcaatcagaccccaacatagaaagttgcacgacaactcagtcacattcgaggagtactatcactacgcccagttgacgagagctgaggaggaccaatcttccacaccggagacgggagtcttgagtatcatcttcccatctaagagtgacggaggagttcaaaagacgagtgagcatggtgccaaggacgcagctgctttgaacacgtcagaccctgcaactagaatgacgatcacagacgacgagtggaacaacgcttccagagccttgagaactgccactagaggtgctatcttctacttgatcacaacggacatcttgggtcccttcggtttgccttacgctttcgcaacgatgggttggggacctgggatcgcattgtacactgtattcgcctctttggctggttactctggttacttgttgtgggacactttcttgggcttggacagttaccaattcccattgcgtagtttcggtgacatgggcttccgtttgtacggaccatacatgaggcacttgttcaacttcttgcaatctatccagttgttgttgaacgtcggcttgatcgtaatctcaaacggtgaggcattgtcccaagccgctaagttcaagttgtgctatatcatctgttgtttgatctgggctttggtcggtttcttcttgggtcaaatcagaacattgcagaagttcggttggttggccaacgctgctgtatggttgaacttgttgtgtatgttcgtaactatgggaggtgcagcccactcacctccaaaccatgctgcctacacccaaacagccggatacacaatcgggaacggttctagcgtaacgccaaacgcaaacggagttttccctccagtcaagaccactggtggcttgccagacccttcagacttcgctgcttcagtatctggcgctatgcaggctgttttcgcctacggaggtgccatggttttcccagagttcatggctgagatgaagagacctaaggacttcttgacagggatgtgggcagctcaagccttcatctatttctgctacatgttgtatggtttgttcatgtacgcctaccagggccagtactccatcaacccaacgtacttgggtatctctaagtactctatccagaccgctggtaacgtgttcgctatgttgtccggagtcattgccgctgggttgtacggtaacatcggggtcaaggtgatctataacaacatcttcgtcgagttcttcagatgtcctccattgacagcaaaggctggtaagttgatgtgggtagcattgatcccagtttactgggctatcgcattcgtattggctgctggtatcccttccttctcaggtttgacatcagtggttgcagctttctgcatcttgcagttcacttacacctttcccccaatgttggctaccttgttctggttgcaaaagtacgctttgagtgacggtgagggtttcgacccgtctacgggtgagactgtcagacatgacaggggcatcaagagattggcaaggggattcagaaacatgggtactaagagaatcatcttctcttctttcaacgtcttgtacttcttgggtgctttggccttggctggtttgggtgcctactcagctatcacgggtttgatcagtgcatacgcatcagaggttacaactagcttcacttgtaagagtccgttggactcttaa

SEQ ID NO: 416 - DNA, 1797 bp, Penicillium fellutanum
atgtctcaacaggaggagttcggtgacgagaagacaggtgactccgtaactcaagtgcaagacaagccattggcatatggaaacacgatcaggcctcatcatagggagccacacgactctaaggtaaccttcgaggagtaccatcattacgccaagttgaccagggcagaggaggacaactcaactactcccgagactggtttcatgagcatcatcttcccttctaagaacgatgggggtgttcagcaaactgaggagaacgctactcgtgacgcatcagctatgaacaccagtgacagagccacacgtttgaccatcacagacgaggagtggacaaacgcttctagagcattgagaactgcatctcgtggtgctatcttctacttgatcactacagacatcttgggtccattcgggttgccatacgccttcgcttcaatgggatggggtcctgggatcgctttgtacacagtgttcgcaggattggctggatattccggttacttgttgtacgacactttcttgggattggactcttaccaattccctttgagatccttcggagacatggggttcaggttgtatggtcactggatcaggcatttgttcaacatcttgcagtctatccagttggtcttgaacgtgggcttgatcgtaatctcaaacggtgaggcattgtcacaagctgctcagttcaagttgtgcttcatcgtatgctgtttgatctgggctttgatcggattcttcttgggtcaaatcagaacattgcaaaagttcggttggttggccaacgctgctgtctggttcaacttgttgtgtatcttcgtaacgatgggtggtgcagcacattcacctccaaactacgcaggagcatctcaagcagctggcgcaggaatctcatccggattcaacaacgggacggctactttggtaagccctttggcagacggatctttccaaccagtcaagacctctggtggcttgccagaccctggttctttcggtgcttcagtatctggcgctatgcaggctgttttcgcctacggaggttccatggttttcccagagttcatggctgagatgaagagacctaaggacttcttgacagggatgtgggcagctcaagccttcatctacttcgtgtacatgttgtacggtttgttcatgtacgggtaccagggccagtactccatcaacccaacgtacttgggtatctctaagtactctgtccagaccgctggtaacgtgttcgctatgttgtccggagtcattgccgctgccttgtacggtaacatcggggtcaaggtgatctacaacaacatcttcgtcggaatcttcagatgtcctccattgacaacaaagtcaggtaagttcttgtgggtagcattgatcccaatctactgggctatcgcattcgtaatcgctgctggtatcccttccttctcaaacttgacatcagtggttgcagctttctgcatcttgcagttcacttacacctttcccccattgttggctaccttgttctgggtcaagaagtacgctttggcagacggtgagggtttcgacccggttacgggtaagactgtctaccatgactccggcttcaagagattcgcaaggggattcactcatatgggtactaagagaatcatcttcggtgttttcaacttcttctacttcttcggtgctttggccttggctgctttgggtgcctactcagctatcacgggtttgatgagtgcatacagtgagagtgttacaactagcttcacttgtaagagtccgttggacggttaa

SEQ ID NO: 417 - DNA, 1791 bp, Aspergillus cervinus
atggctcaattggcctctttggctttggaggaccctagattgatggacgagaaggaggtagtcgacatcttgaatgggggaatccgtccacagcatagagacttgcatgactccagtatcaccttcgaggagtatcaccattacgctcaattgacgagagcagaggaggatcaccaacaggacagtcaatcacacgacaaggagagagggtggttgtctatcatcttccctaccaagagtgatgggggaatcgagcaagtaaccgacaacgtaagtaaggacgctaccgagttgaacatctcaaacaaggagacaaggatggctatcaccgacgaggagtggaccaacgcaagtagagctttgagaagcgcaaccagaggggctgtattctacttgatcactaccgacatcttgggtccattcggtttgtcatacgctttcgcaaccatgggatggggtccaggaatcgcattgtacaccgtattcgctggattggccatctatagtggttacttgttgtacgtggcattcttgggtttggactcataccaattccctgtaagaagttatggggacttgggtttcagattgtttggtccctgggcaagacatttgttcaacatcttgcaggctatccaattgatcttgaacgttggattgatcgttatcagtaacggagaggcattgagtcaggctacaaagttcaagttgtgtttcatcatctgctgcttgatctgggcattggtaggtttcgtagtaggtcaaatcagaaccttgcaaaagttcgggtggttggcaaacgcagccgtatggatcaacttgatctgcatgttcatcaccatgggtggtgctgcaaacggtcccccaaactatagtgctgtaggctccagtgcaggacaagttatcggtaacggctccttggtacaacagttgccggacggaagttggcctccagtacaaaccagtggtggcttgccagccagtgatgccggattcaccggtgctttgaacggagctatgcaagctgttttcgcttatggcggtgcaatggtcttcccagagttcatggctgagatgaagagaccaaaggacttcttgaccgcaatgtgggctgctcaggctttcatctacttctggtatatgttctacggtttgttcatgtacggtttccagggtcagtattcagtaaacccaacatacttgggaatcagtcaatacggtatccaaactgctggcaacgctttcgccatggctagtgcagttatcgctgctgccttgtatggtaacatcggtatcaaggtattgtataacaacatctgtgtcgagttgttgcatttcccaccattgactaccagaggaggtaagttggcatggatgggtgttgtaccggtatactgggctttggctttcgtaattggtgccggtatcccaaacttctcaggtttgaccagtgtagtagccgctttctgtatcttgcaattcacatacacctttcccccattgttggcaactgcttattggatcaagcaagcagccatgaaggacggagagggtttcgatcccgctacgggtgctaccgtaagacaagacggtggtatcaagcgtgtattcagaggattcttcgctcaaggtaggaaggagttgatgatgagtttgttcaacatcttgtacttcttgggtgctatggctttggctgccttgggtgcttatgccgctatcgagtctttgatcagtgctttcaagaccagtaccactaccagttacacgtgcaccagtcccgtacagggttaa

SEQ ID NO: 418 - DNA, 1848 bp, Talaromyces variabilis
atggctcaaccagggagtttgatgcaaggtgagagtggtgaccccaggttgcatgccgaggagagacaagtgttggacgcaatcgagcattccagagagaaggaggttttggcctctagagagaaggagttgaacagcaacgagaagcatcaggactcttccatcaagccgcagcaacgtttgatccatgacccagacgtttccttcgccgagtactatcattacagtagacaaacgagagctgaggaggagacccatccaactgttgggaagacaggaatgatgggtatcttgttcccttccaagagcggacccggagcaggtcatacaagcgacgaggacgaggcaaaggagaacaacgtacatgtgacaggttctttggaggctagagctgttatctcagacgacgagtgggctcaagcttcaagggccttgagaacagcaactcaaggaacggctttctacttgatcacgacagacatcttgggtcctttcggcttgccttacgctatcgctactgttgggtggggtccgggtgttgcattgtacacagtcttcgctgcattggctgggtattccggctatttgttgtgggacgtattcttgggtttggacagttatcaattccctgttagatctttcggggacatcggctatagaatctatggtaagtacatgagatacggtttgtccatcttgcaagggttgcaattgttgttgaacgtaggcttgatcgtcatgagcaacggtggtgcattgtctcaagcttctaaggagaagttgtgctatatcatctgttgtttggtgtgggctttgttgggttacttcagcggtcaaatcagaaccttgcaaaagttcggttggttggcaaacgctgctgtctggatcaacatcttgtgtatgttggtttcaatgattggggctggtaagtatgggccttcatacggaagtatcgactcatcagcaggcatcaacatcgacccagctttggtcacaccaatcaacggtacatatccagccttgcaaacctctggtggaatcccaccttcacccaacggtttcgttggtgctgtcggtggtgctatgaacgcagtattctcatatggtgggagcatggtattcccagagttcatggccgagatgaggaagccaaaggacttcttgtgggctatgtgggctgcccagttcttcatctatgttgtgtatatgttctacggtttgttcttgtacgggtatcaaggtcaatatgttgcaaacccttcctatttggggatcgctagctacggaatctcaactgccggaaacgtgttggcaatgttgtccgctgctatcgctgccgctttgtatggtaacatcggattgaaggttttgtacaacaacgtattcgtggagatcttgaacttcccacctttgactaagacctctggtaagttgatctggatcggattcatccctatctattggagtatcgctttcatcgtaggggctgctatccccaacttctcagcattgacacaggttgttgctgctttctgcatcttgcaattcacatacacatttcccccattgttgcacatcggatacaagatcaagcaagctgccttggcagaccaagcaaccttcgacccagctaccggtgctgcccctcagaagttgggtttcaaggactacatcagatacttcttcgctcagcgttggtacttgaacgttttgcatgtcatctacttcttgggtgctttggcattggcaggtttgggtgcatatgccgcaatcgagacctacaaggctggtttcgcttctggtgtcaccacttcattcacttgcacctcacccttcggaagctcataa

SEQ ID NO: 419 - DNA, 1797 bp, Rhytidhysteron rufulum
atggctgctgttggggcattcttggctggtggcgaggacccgaggttgtctatcgaggcaacgcatgctagccctatagcaccacgtcaaaggtccttgcatgacccaaacgtgactttggaggagtacatctattacgctcaaaagactcgtgccgaggaggaggcaagctacaagttggacgctccaaagaccggtatcttgcaagtgatcttccctcctaagaacggacctagcgctatccgttccgagtcccctgaggttggtgccaggttggcagagacggagaagaggggtgaggtgttgaacttggccaggaagggtgacagagcccatgtttcagacgaggagtggtcaaacgcatctcgtgcattgagaacggctacttgggctgcttgtttctacttgatcacgacggacatcttgggtcccttcggtatcggattcgctatcgggactttgggattcggaccgggaatcgcattgttcacagtgttcggtttggctgctggttatggtggttacttgttgtggatgatgttcatgggtttggacagttatgagtatcccttgaggaactatgccgacttggcatacaggatcttcggtccaatccctcgtcatttcatcaacgtattgcaaagcttgcagttgttgtgtggagtgggtttgatcgtaatctccaacggtcaggctatctcccaggtttctaagttcagattgtgctacgctatctgttgcttgatctgggctatctgtggtttcggtatcggtcaagttagaagtttgcagaagtatggatggatagcaaacttggcaatctggatcaacttgttgttgatgttcatctcaatgggtgtaatcgcacattccccaccaaactacagtgtagcagcattcggctcagctggtagtacgacggttccagccgacgtgaccccagacgagaacggtgtatatccacctatcaagcactatgccggtatccccaacccagactcattgatcggttccatcaacggtttgatgcaaggtgtatacgcttacggtggcgctcaattgttcatcgagatcttggctgagatgagaaggcccagagacttcttgaaggccatgttctctgctcagttgttcatctacatagcctatatgttctatggcttgttcgtttactcttaccagggccaatacacttacactttgtcctatttgggagtttctccatatggatggcagacagttggaaacatgttggctgtaacctccggcatcattgctgccggtttgtatggtaacataggaatcaaggttttgtacaacaacatcttgatggacttgttcggtttcccacctttgaacacaagaggtggaaagttggcttgggcagggatcgttccagtctattggtcaatcgcttacttggttgctgctgcaatcccagacttcttcggattggtaagcgttgtatctgctttcgcaatcgtgcaattcacatacacattcccacctttgttggccttgggtttcgtagtccacaagaacgctatgttgccagacgagggcttcgacccacgtactggaagagtaggtagatcagatgctggggttaagagatgggtcaggggtttcttgaagggtccatggtggttctcagttggttgtgtattgcatgtgggtgctgctgttgttgttgctgggttgggtgcttatgccgctgtaaagggattggttgaggctttcagggttcctcaagtcaacgcattcagctgcagatcacccttggacggtggtttgtaa

SEQ ID NO: 420 - DNA, 1764 bp, Leptoxyphium fumago
atggctactttggctcctgcagctgttgttggcgacggtggggaccctagattgtccgcagacgcttcacgtcctccggtctatacggctagggcagaccatgacgctggtgcccatccaggtgcaatgatggttcacgacccaaacatcttgatagaggagtacatgtactacgctaagttgtcaagagaggaggagagatccttggaggctccgagtaacccatggttgatcgccttgggtttggcaaagaagaaccaatctgctgagaccgtaggacaagcctcagacgcagctgaggacgagaagaacggcaagacagactcagcagccactgctgttagacctagtccagtttcagacgctgagtggcatcaagcccaaagagctgctagaacagctggatggggtgccatgttcttcttgatcaccacagacatcttgggtccattcagcgttccatgggcattgagccaaatgggatatggtgagggcatcgctttgtatactgtattcggtgttatggcattctacgctggttggcagatctggagaatgttcttgcaattggacagtaccaagtaccctatgaagtcctacggtgtaatcgcttatagggtgtatgggccttgggtaagacatttggtgaacttcttgcaatcattgcaattgatcttcaacgtcggtgttatcatcatcggaaacggtcaaggattgtggcaaatcaactctaagatctgctacactgtttgttgtgttatctgggctgtttgtggtatggtaatcgggcagatcagaacattgcagaagttcggttggatcgcaaacatcgctgtatggatgaacgttgttgtaatgatcatgaccatggcagttgttgcaaactccttgccaaactatgacatcgctatggtcttgaactctatgacgatcgacacccctccagcacctgttcatgtaacaggttccgttccaccaggctctaagttgacagaccaaatcgttggtttgatgcaagccgtctattcctatggtggagccatgttgtattgcgagttcttgtcagagatgagaagaccaatggacttctggaaggctatcgtctgtgccgagtctttcatctatggctgctatttgttcttcggcgtattcgtctattcctaccaaggtcagtataccgtgaaccctgccaaccagggtttgagtttgagaggaccattggttgctggaaacatcatctcattgttgtctgctttgattgccgcaggtttgtacggtaacatcggaatcaaggtcatttaccagaacttgttgcaggagttcttgcatttcccagacttgacaagtactaagggtaagttcgcttgggtagcttgcgttcccgtatactggggtatcgctttcgttttggcagctgcaatcccaaacttcagtgcattgtctggattggtagcagcattgtgtatcttgccattcagttacacgttcccacctttgttgatgatcggattggagacccaaagagacgctgtccagccaggtgagggattcgacccagcaaccaaccgtgttatcagacatgacaacggttggagaaggtgggccagaggctatatggccaagcaatggtatgtcaagatgttcaacacgttcttcttcttgggatctgtagtgactttggttttgggtgcatacagcgctatcgttggtatcatcgacgcttatgacggtggttatgcaagtccattcggttgcactccttaa

SEQ ID NO: 421 - DNA, 1716 bp, Cladosporium cladosporioides
atggctatgcccttggcagcaactgttgctagggacaagcacgaccctttgatcttgtcaccgggtgctgagacagtgcctgctgccagatccacacaaggtagtgttgttacgatcgaggagtacatgtactgggctgctatcacaagacacgaggagtccttgttgccgaagatcaagggaccagttgccaagttgttgggctcaagcaagagcgacgcagctacacattcaacgagatctgaggcaccaaccacagagatgaaggacttgaaggcagctccgccaaccgcagtttcagtgtcagacggagagtggcataacgctcaacgtgctgctagaactgcaggatgggctgctgtcttctacttgatcactacggacgttttgggtccatatactgtcccatgggccatggctcaaatgggctacggtccaggaatctctttgtacgccgttttcggagcattggctggatataccggttggcaattgtggagaatgttcttgcaattggactcagacaggtatccgatgtcaaactactcagacatcgcattcagaatctatgggcctttcgcacgtcatatcgtaaacgtcttgcaatctatccaattgttctgtttggtcggtgtaatcatcataggcaacggccaaggtttgtaccaaatcaacggaaacatctgttatgtcgtttgctgcgtgatctggagtgtgttgggaatgttcttgggacaaatccgtactttgcaaagattcggttggatcgcaaacttcgctgtatggatgaacgttatcgtaatggtgatggttatggcagttgttacccacggtgagccaaactacgaggctgcatcaaaccagaacggaatcgacactactccacccatccctaccgtaaccacatcaggtggtgctccgccagacatcgacttcagtggacaagtattgggtttgatgcaagcagtcttcagctatggcggtgctatggtctattgtgagttcatgtcagagatgaggagaccattggacttctggaaggctttgttgatcgctgaggccttcatcttctcagtctatatcttcttcggagtctatgtatactcattccagggtcagtatgttatcaaccctgccaaccagggcatgtctatgagaggccctttggttgccggtaacatcttgtacttggttaccggtttgatcgctgctgcattgtatggtaacatcgggatcaaggttttgtaccaagcttgtttcaaggagttgttgcacttgccggacttgggttcaaagaagggaaagtggatctgggtcttcttcgtacctatctattgggctttggcattcttgttggcagctgctatcccaaacttctctgccttgagcggtttcgttgctgctttgtgtatcatgcagttcacttatactttccctcctttgttgatgttgggattggctgctcaaagagacgccgtaagggaggacgagggattcgacccctcaaccggattgaccactagacatgacaaaggcgctaagagatggatcagaggtttcatggctaagagatggtatgtaaagttgttcaacgctgtcatcgccgttggtgcattggtcaccgctggtttgggcatgtattcctcaatcgagggtatcatggacgctttcagcggtggtagatctactgcattcagctgtactggtccagtgtaa

SEQ ID NO: 422 - DNA, 1854 bp, Penicillium bilaiae
atggctggtatcgtgtccgcagcaaacttgggtggagttgccgaccctagattgggcgacgaggcagacatcatcgggacagagaaggagcacccaaacatcgacatccatcacgacatcgagcctcctatcttgtatggtacaggttctgtgtatttggactccaacatcaccttcgagaactaccactattgggcaaacaggtcacgtgaggtggagaagcatatcagaacagacactgctgggttcgctgcaatcggtaacttgttgttgaacagaaaggggaagcaggaggagcctgccgctgagcctaccgagcctgtttcagtcgccgagaagtctgagttcgacactaagactaccaatgcccctggtgctgagactgctagaacagacgagtctacagacagatggggtgtttctgagaccgagtgggagcaagcacaaagagcagccagaactgcaacctgggggtccatcttctacttgatcactaccgacatcttgggtccaacaaacgttccgtacgctatctctagaatgggctacggtcctggcttcgcattgtatacggtattcggtttgatggcctgttatagtggtttgcaattgtggaggatgttcacgggcttggactctactcgtttccccatgaggaactacggcgacttggcattcagagtattcggtaactgggccaggatcggtgttaacgtgttgcaaagtttccaattcttcttgaacgtttctttgttgatcgagtcaaacggtcaaggtttggcacagatggtggctggtgtcaacaacacaggtggtttcttgtgtttcatcgctgctgaggtcatcttcatggtcatcggtttcgtattgggacaaatcagaaccttgcaaaggttgtcatggttggcaaacttggccatctggggtaacgtaatcgtaatcatcatgacaatggtcgtcgtttacaagtatccacccaactacgacgccgtcaagacttcatacggtatcgagaaaggcccaatcgtaacttcagcaacctggcctacaggcttggacttgaacgacaaggtcactgctatgatgaacgcagtattcgcttatggtggtgccactttgttcaacgagttgatggccgagatgaggagaccattcgacttctggaagggtttcatctgtgccgagttgttcatctatgtttgctatttggttaacggtatggttgtttatgctgcccaaggtcaattcgtttacaaccctgcctatgaggggatcccaaacacacctggtgcataccgtttccagacgttgggcaacgcattgtcattcgtaacaggcgctatcgcagctttgttgtacggtaacatcggaatcaagatcttgtacagctcagttttgagagacgttttccactttccacccttggactctaagttgggcaagtggttgtgggtcggtttggttcctgtttactggatcttggccttcgttatcgcaggtgccatccctcaaatcagtaacttgacttcattcgtgggtgctgcttgcatcttgcaattcagttacacgtttccgccattgttgttggttggttaccacgtacagaaggacgcaatgttgcctgaggagcaattcgacccacgtacaggccaagctcaaagagtcgaccatgggatcagaagatggatcagggggtataagaagaagttctggtggaacactttcgacttggtttactccttggctgcattggcattggcaggtttgggaatctgggcctccgtggtttctatgaacaagactttcgagactacaaagttgacccccttcacctgtacaaaccctgcaggataa

SEQ ID NO: 423 - DNA, 1863 bp, Gamarada debralockiae
atggctggtatcgtgagtgcagcaaacttgggtggagttgccgacgcaagattgggcaacgaggcagacgtgatcgggacaaacgacgagcacagaggtggtgtatcacatgacatccctccaccagacagccatgggcataacacaatctacttggactccagtatcacgttcgagaactaccattactgggcaaacagatccagagagttcgagaagcatatcagagtcgacaacgttggtttggcacaattgggaaacttgttgttgggaaagaagatcccgaacgagcctccagaggtggacaactcagagaacgtcccaggtaacacgatctctgagagagtcttggagaacgacgagaagaacacaatctcaaacgagaagacttctggtaactctacaactggttccaacggtggttggtcccacggtgtcacagaggctgagtgggagcaagctcaaagggcaacgagaacagcaacttggggatccgtgttctacttgatcacaacagacatcttgggaccctataacgttccttgggcaatcagtcagatgggatatggtccgggagcagcattgtacaccgcattcggcatcttggcttactacagtgggatgcagttgtggaagatcttcatcggcttggacagtacaagatacccaatgaggaactacggagacgttgcattcaggatctacggtaactgggccagagtcatcgtgaacttcttgcaaagcttccaattcttcttgaacgtcgttttgatcatcgagtcatctgggcagggtttggcacaaatggcagctggtgcaaacggtaacgggttcttgtgtttcatggttgctgaggttatcttcatgttgttgggtttcttgttgggccaaatcaggacattgcaaagattggcctggttggcaaacttggcaatctggttgaacatcatcgttatcatcatgacaatggtagtggtgcaccaatatcccccaaactacgctgcttcattgacaactttcaacactccccaaggtcctatcgttaagtcagccaactggcctccaggtactacattgttcgacagaatcaacggcttgatgaactgtgtgttcgcttacggtggtgccactttgttcaacgagttgatggctgagatgaggagaccatacgacttctggaagggcttcatctgtgccgagatcttcatctacagttgttacttgatcatggggatggtcatctacagcgctcaaggtcaattcgcatacaatccggcttaccaaggaatcccaaacagcgcataccgtttccagaccttgggcaacgctgtatcattcatctcagcattgatcgcagcattgttgtacggaaacatcggtatcaaggtgttctactcagctgttttgagagacgttttcaggttgcctccattggacaagagattcggtaagttgttgtgggttgcattggttcccatctactgggctttggcatggatcatcgctgcagcagttccccaaatctcaaacttgacctctttcgttggagctgcttgtatcttgcaattctcttacactttcccacctatcttgttggtaggctacaactgtcaaaaggacgcaatcttgccagaggaggagttcgaccccagaactggtgttgcaaacagagtggacaacggttggaagaggtggatgagaggttacaagaagaagttcgctatcaacactttcgacgtattgtacagtttggcagctttggctacggcaggtttgggcttgtacgcttctggtactggtatgcatgagactttcgcatctacccccttgaccccattcacgtgtaagaaccctgcaggttaa

SEQ ID NO: 424 - DNA, 1821 bp, Pseudocercospora pini
atggctggtatcgtgcctgcaggtaacttggcagtcgcagaccccaggatgtcagccgaggccgacaacatcggtacgagaagagactctatcatcaaggacaccgctccacccgacgctcatggacacaacactatctacttggactctagcatcactttcgaggcatatgagttctatgcagctagagccagggaggctgagaagcacttcacgaccgagtctgtagtaaagcaggtttctaaggtattggtcggaaagaaggttgccaaggagcaacaaccggttgacgagtaccctaccggtacgtcagagaaggacccaaagcatgagttggcttctccacctagtaacggttcagacactgcccctggtgaggacagattcggtgttactgagactgagtgggagcaggcccaaagagctaccaggactgctacatgggttactatcttctacttgatcaccacagacatcttgggaccatacaacgtgccctgggcaatctctcaaatgggttatgggcctggtatcgctttgtacgtcgtattcggattgatggcattctatagcggattgcaattgtggaagatgttcatcggtttggactctccaaggtatccaatgaggaactacggtgacttgggcttcagggtcttcggaggctgggctaggcaaatcgtcaacgttttgcaatcctgccagttcttcttgaacgttacattgttgatcgagagtaacgggcaaggtttgcaacaaatggcagctggtaagaacggtaacggcgtgttgtgtttcgtagcagccgaggttatcttcatggtttgcgggttcttgttgggacagatcagaacattgcaaaggttgggattcttggcaaacttggccgtatggttgaacgtcttcgttatcttgatgacgatgggtgtggtcccgagtttcggtccaaactaccaagcatcattcgcaacctataagaccccaccaaaccaacctgttagaacttcagcaaactggccagagggtaccactttgatggacagaatcaacggcttgatgaacggtgtattcgcatacggtggtgctacattgttcaacgagttgatggccgagatgaggagaccaatggacttctggaaggggttcatctgtgccgagatcttcatcttcagcgtctatatcaccatgggcatggtggtctatagttaccaaggacaatacactttcaatccagcctaccaaggaatcccaaactcagcatacgcatggcagacggttgggaacgcaatctcattcgtgagtggcttgatcgcagcattgttgtacggtaacatcggcgttaaggtcttctacgcagcagttttgagagacgttttcagattccctccgttggacgacaagaagggtaagttggtttggatcgctttgatccctatctactgggcattggcattcatcatcgctgcatctatcccccaaatcagctacttgatctccttcgtcggtgcagcattcatcttgcaattctcatacaccttcccaccaatcttgatggttggttacaacatccaaaaggacgcaatgttgccagaggagcacttcgacccagcttcaggagaggcaactagagttgactcaggtatgaagcgttgggttagaggttacatgaagaagccattcagaaacactttcgacatcttgtacttcttgggtgctttggctacagccggtttgggtatctacgctagtgtagtctctatgcatgacagtttccaaaccacaaacttgactccattcacttgtaactccccaacaggctaa

SEQ ID NO: 425 - DNA, 1860 bp, Rachicladosporium antarcticum
atggctactttgtcccacagttacccaggtggccaaggttccgagaccccagcaaacatgacgagtttcgccaacatcggaggtgtggcagaccctaagttgggccatgaggccgacaacttgggaagggggagtgtgggtggaacaggtcaggagatccacgacgcagccgtcgctagcggaggtgctaggaggaacagtcacatctatacagacaccaacatcacattcgaggactaccactattgggcaaacaggagtagagagtatgagagaacaatcgacgtttccaacgctggtttggctgggagtatgaagacaatcttgggacgtaagcaagacaaggagcctgctgctttggcaagtagcagtcatagtgggagtgacaacgagaagacagacgcagctcatggcgagagtagatacggcatcagtgagagtgagtgggacaacgcccaaagagcaatcaggacggcaacatggggtagtatcttctatttgatcactacagacatcttgggtccgtacaacgtgccatgggcaatcagtaacatgggctacggaccaggcttcgcattgtacacggtattcggaggcatggctgcatacagtggttggcagttgtggcagtgtttcatcggtttggactcaaccaggtaccctttgagaaactacggagacttggctttcagggttttcggaccgagtgctaggatggttgtaaacatcttgcaaagtttccagttcttcttgaacgttagtttgatcatcgttagtaacggacaggggttggctcaaatggcattgggaaagaacggaaacggctatatctgtttcgtagtagcacaagttgtattcacagtcttgggattcttgttcggacagatcagaaccttgcaaaggttgagttggttgtccaacttggctatctggttgaacgtaatcgtaatcatcatgacaatgatcgtcgtccacgagtatccaccaaactacgcagctgctgctacaaacggaatcgagagaggtcccgttgttacatccgctggattgcctccaggtaagggtttgatggacaacatcaacggtttgatgaactgtgtattcgcatatgggggtgcaactttgttcaacgagttgatggccgagatgagaaggcctatggacttctggaagggtttcatctgcgcagagatcttcatctattgcgtttacttgatcatgggtatggtagtgtataacgctcaagggcaattcacttaccccgtcgctttccagggtatcccaggagttggtggtgcctacaactggcaaaccttgggaaacgctatctctttcgtgagtgctttgatcgcagcattgttgtacggtaacatcggaatcaaggtagtgtacgctagtttgttcagagacgtcttcaagttcccaccattggacacaaagaagggaaagttgatctgggtggctttcgctccaatctactgggccttggctttcgtcgttgccgctggaatcccacagatcgcaaacttgacctcattcgttggtgcagcttgtatcttgcagttcagctacacgttccctccaatcttgcaagttggctataactgtcaaaaggacgccatgttggacactgagagattcgaccctgccacaggtgttgctgagagagaggacagtggtgttaagagatggatccgtggttacatgaagaagccattcaagaactccttcgacgttgtctacgctacaggtgcattggcaactgccggattgggtttgtgggccagtatcatcggtatgcataacaccttcaaggagactgccatcacacccttctcttgcgtaaaccctgcaggataa

SEQ ID NO: 426 - DNA, 1740 bp, Taphrina flavorubra
atgtccgacttggccttggtcgagttgtcccacgagggtcacgtgttgcaagcacccatcgaccaattgcgttccaaggaggttgcctgtgtagtcaaggacgaggagttggtgaacggtcatgagtcaatcaacgaggagcaaagaagacagagcgagtcattgtccgcctacttgtactacgcagacagggcaagacaatcaaaccagacaaacgcacaagctcaagacttggacagacatgaggacggtatcacatcctccgttccggcagtcagatccgggaacttgttcagaggtgaggacgacatctacggagtcactactacagagagacaacaagcagacagggctgttaagaccgctacgtggatgggtgccttcttcttgttgactacagacgtattgggtccctactccgttccattcgccttcgctcaattgggttacggaagcggtgttatcttgttcacggtcatgatgttgtgtgcagcctactccgcatggatcttgtggagattgttcttgaagttggactcccctgagtacccagtcatcaactacggtgacttggcatacaagatcttcggcaatgctgccagaatcggtgtttcctctttgcaagccttgcaattgtggttcaacgtgggcgtaatcatcttggtgaacgctcaagcattgtctcaagttgcatccgacaaggtgtgtttctctgtgttggcattgatctgggcaatcgtagggatgttgttgggacaaatcaagactttgcaaagattcggagcattggccaacttctccatctggatcaacttgacatgtttggtaatcatcatggctgtcgtagttagatctccaccaaactactccaccgctttggcacagtacggtcaagacgtcgtaaacatcgttcatccagccgctgttagtgtaccggcattctccacaggagctttgaacacacaaatcgtagccgtgatgcaaatcgtatactcctacggtggtgctacaatcttcgtagagttgatggctgagatgcgtagacctttcgacttctggaaggctttggttttgtcccaattgactatctacgtatgttacttgatcttcgggatcttcgttgctcactaccaaggccagtacgcaatcaatcccgcatcacaaggtttgagcccatacgcctggcaaaccgttgccaacgtgttgaacttgttggcttccatcatcgcagccgtgttgtacggaaacgttggtttgaaggtattgtacagtttgttgatccaaaaggctttgaaagggcctcccttgaactcacccagaggcagaatctggtggacgatcttgatcccaacatactgggttttggctttcatcttggcttcagcaatcccacaattcaacaacatctccgcattggtagccgctgtttgtatcttgcagttctcctacacattccctccgttgttgatgttggccttcaccgtgcaaagagacgcatccgtagctgagcaattcgacgctttcactggtatcgtgcatagaatcgacacatggtccacattgggtcgttggaagagaggattgaggagaagatggtacatcaaggctttcaacttcatcttgttcttggcttctgcatccttggcaggcttgggtatgtgggcagctatcagttccttgagagagactttcagcacgaacaagactgttacgtccttcacttgtaaggctccagtttaa

SEQ ID NO: 427 - DNA, 1878 bp, Ustilaginaceae sp
atgggtgttaaggagttcttcgctagagctaagagtgttgagatcgagagaacacaccatacgtcaaacaaggaggagacacatcagtcagacttgccaggtcagggtgttcccggtttggctcctgttccggctttgtacgaggagccagcccgttcagacatcacattggaggagtatatgttctacgcccaagttcaaagggagcaggagaagttgtacggtgcagcaggtgtggctgttgaggcaaacgcacctgagggtaaggggttcttgcatgacagcaagcaggagaagaagcactcaagctcagaggaggtatctcaacatagcactgttatcgagacaggagttgctaagcccactgtgaacaacacagacgtttcaactttcgaccaattggacggtttgtccgagactgagaaggagtccagaaacgcacatagagctatcaagactgctacatggatcgccgtattctacttgatcacaaccgacatcttgggtccatacggtgctccatatgcaatgagccaaaacggatacgtaacaggaaacgttatgtacgtggtgatgggcttctgcgcatggtggtgcggcttgttgttgtggaagttgttcactcagttggactcagctagatatcccatcaagacctacggagacttgggtgagagagttgtcggtactcccatgaggtggacgttcaacgcattgcaaacaatccagttgatcatcaacgtgggtttgttgtgtttgacaaacggtcaagctttgtctcaagtcatctccggtgctcctggtaacgcaaacttgtgtttctcagtctgcgttgtaatcttctccttgatcggaatgggtttcgcacaagtccaaactttcaggggcttgggattcgctgcctcaacagctgtctatcagaacatcgccatcgtggtcatctcaatggcagctatcatcaagtatggtccctacattgccggtgctcaggcatcatacggtaaggactacccttacaacaaccaacccgttatgacatccgctttcgtatcctacgacatcacacaaaaggtaaacggtttgatgaacatggtcttcgcttacggtggtgccatgatcttcccagagttgatgtccgagatgaggagaccaatggacttctggaagggtatgatctctgcccaggcattgatctgcactgtgtacttggtttacgcaaacgttgtttacgcctaccaaggtcaatatgttttgggtcaatcctacaacgggatcgctaagtactcattccaaactgtgtgtaacatgttggcaatcttgtccggtacaatcgctgccgctttgtacggtaacgtaggattgaaggttgtatacgtcaacaccgtacaggctttcttcaagggtccagcattgaactcccccagaggtagagtcatctgggcttcaatctcagtagtctattgggcattggctttcgtagtcgggtcagctatcccccaagtccaaaccatctcaggcttgatcgctgctatcgccatcatgaacttctcatactcattccccttcatgttggccttgatcttctacatcaagagagacgccatggttggtgacacacccttcactccaggtagtcctgctcagagacaggacacttggtctcaatggtcacgttgggagagaggtttgtttggtgggagattcgagatcttgggtatcgctattccgggtatcgttgtcaaggttgtattgttgatcttcactttgggatcttacaccttgagcggtttgggtatgtacggttcaggcgagtcaatcaaggctaccttcgactcaacagccgcagcaacatcattcggttgtgcagctcccgtgtaa

SEQ ID NO: 428 - DNA, 1863 bp, Ustilago filiformis
atgggtatcaaggacgcagtcgagcatgctatggcacatgaggtggagagatcacaccatacgtcaaaccaggaggagacacatcagtcagacttgccaggtcagggtgttcccggtttggctcctgtaccggctttgtacgaggctccaccgcagtctggcatctcattggaggagtatatgttctacgcccaaatccaaagggagcaggagaagttgtacggtgcagcaggtatcgctgttgagaggaacgcaccaaacggtgctgggtacttggaggacgccaacgagaagcatgtcagtgagaagacaagtcaacattctggttcagccggtggtgttaagcctcacatcaacaacaccgacgcctcaactttcgaccaattggacggtttgtccgaggtagagaaggagagcagaaacgctcacagggctatcaagacagcttcttgggtgggtgttttgtacttgatcacaacagacatcttgggaccctatggtgcaccatacgctatgtctcaaaacggatgggtgactggtaacgtaatgtacatcgtaatgggattctgcgcctggtggtgtggcatgttgttgtggaagttgttcatgcaagttgacagcgctcgttacccagtcaagacttatggcgacttgggagagagaatcgttggttaccctttgaggtggactttgaacgccttgcagactttgcaattgatcatcaacgtgggtttgttgtgcttgacaaacggtcaagctttgtcacaagttatcagaggtgcacctgggaacgcaaacttgtgtttctcagtttgtgtagttatcttcgccttgatcggtatggcattcgctcaagttcaaaccttcagaggattgggttttgctgcctcaaccgcagtctaccaaaacttgatcatcgtggttgttagcatggctgcaatcatcaagtacggtccttacatcgcaggcgcacaggccagttacggtaccgactacccatacaacaaccaacctgttatgacttcagcattcgtttcctatgacatctcacagaaggttaacggtttgatgaacatggttttcgcttacggaggcgctatgatcttcccggagttgatgactgagatgagaagacccatggacttctggaagggcatgatctccgctcaagccttgatctgcaccgtatacttggtgtacgccaacgttatctacgcttaccaaggtcaatatgtgttgggtcaaagctacaacggtatcggcaagtacgccttccaaacggtctgtaacatgttggccatcttgagcggtactaccgcagccgctttgtacggtaacgttggtttgaaggtcatctacgttaacactgtccaatccttgatgaaagggccagctttgaactctccaagaggaagagtaatctgggcttctatcgcagtagtttactgggcattggcattcgttatcgcttctagtatccctcaggttcaaacaatctcaggcttgatcgcagctatcgctatcatgaacttcagttactctttccctttcatgttggcattgatcttctacatcaagagggacgcaatggaggacgacgtaccgttcacacctggatactccggtcaaaagcaggacacttggggacagtggtctagatggaagagaggattgttcggtggtcattacgagatcttgggtgttgttattccgggtatggttgtcaagatcgttttgttgatcgttacattgggatcttacgttttgtccggtttgggcatgtatggttctggtgagtctatcaaggagactttcgcatctagtgcagctgccacatccttcggttgtgcagcacctgtttaa

SEQ ID NO: 429 - DNA, 1857 bp, Pseudozyma tsukubaensis
atgggtgttaagaacttcatccatgaggagaccgcacatacgagtaacaagcaagagacacaccaatcagacttgccaggacaaggggttcccggattggcacctgttccagccgtttacgaggacgcaccgatcacgggtgtatcattggaggagtacatgttctacgcccagatccagagagagcaagagatcttgtatggcgcagccggtgtgtccgtagagtccgacgctccgcatggtgccggatacttggactcagctagagagaagcaatcatctagcgagaaggtctctgagcacggtacggtagtgggagcatctaagcctcacatcggtaacacagacgcatcaacattcgaccaattggacggtttgagcgacatgcaaaaggagcaaagaaacgctcatcgtgccatcaagacagctacctgggtatcagtattctacttgatcactacagacatcttgggtccttacggagctccatacgccatgtctcagaacggttgggttactggtaacatcatgtacatcgttatgggcttctgtgcatggtggtgtggtatcatcttgtggaagttgttcatgcaagtggactctgcaagatacccagtaaagacttacggcgacttgggtgagcgtatcgtcggctaccctatgcgttggactttcaacgctttgcaaactttgcaattgatcatcaacgttggattgatctgtttgacgaacggacaagcattgtctcaagttatctcaggtgcaccaggtaacgctactttgtgcttcagtgtttgtgtagtattgttcgctttgatcggtatggccttcgctcaaatccaaaccttcaagggattgggtttggcagcatccactgctgtataccagaacatcgcaatcgtcgtaatctcaatggctgccatcatcaagtatgggccttacatcgcaggagctcaagcatcatacggcaccgactacccctacaacaaccaacctgttatgacttcaaagttcgttagtaacccaatcactgctaaggtgaacggaatcatgaacatggtgttcgcttacggtggtgctatgatcttccctgagttgatgtccgagatgcgtagacctatggacttctggaagggcatgattggcgcacaattgttgatcgtaacaatctacttggtctacgcaaacgtcgtttacgcttatcaaggtcaatacgttttgggtcaatcctacaacggtatcgcaaagtactctttccaaaccgtctgtaacatgttggccatcatctctggtactacggcagctgccttgtacggcaacgtgggtttgaaggtaatctacgtaaacactgtacaaacattcttcaagggaccagcattgaactcaccgagaggtagagttatctgggcagtcatcagtgtcgtttactgggcattggcattcgtaatcggatcctcaatcccacaagttcaaaccatctccgggttgatcgcagcaatcgccatcatgaacttcagttactctttcccattcatgttggctttgatcttccaaatcaagaaggacgccatggagggtgacgttccttacactccaggctacacgggtcaaagacaagacacctggtcagactggtcaagatggcaacgtggattgttcggtggacattacgagtacaacgttttcggtaagaacgtggttgttccaggtatcgctgtaaagatcttgttgttgatcatgacattgggatcatacactttgtctgggttgggtatgtacggaagcggtgagtctatcaaggagacattcgctgcaggcggtgccgcaacaagtttcggatgctcagcacctgtataa

SEQ ID NO: 430 - DNA, 1836 bp, Ustilago williamsii
atgtctttcttgaagaagggttggttgactggccaatctcaggagaagacagacgagcctcagcaaactgccatgccaggacaaggggttcccggatctcaacctgttccagcccattacgaggagcctgtgagaaagggtgtatcattggaggagtacatgttctacgccaggatccagagagagcaagagaagttgtatggcgcagccggtatcgcaatcgaggcatcagctccgccatacacgccttctgaggacaacaagggtgccagtgacgagaagatcaacgcccatggtgcttccaagccgaaggtgaacaacgttgacgcaagcgttttcgaccaattggagggtttgtcagacaaggagaaggagagaagcaacgctcatagaggtttgaagacagctacatggatcgctatcttctacttgatcacaacagacatcttgggaccgtacggtgcacctttcgccatgagtcaaaacggttgggtgaccggtaacatcttgtacgttgttatggggttcgctgccttcgttgcaggcttggctttggcaaagttgttcttggctaccgactcagccagataccctgtgaagactttcggtgacttgggagagagaatcgtcggttacccaatccgttacttgttcaacttgttgcagactttgcaattgatcatcaacgttggcttgatctgcttgacaaacggacaggctttgtcccaggttatcggaaatgccccaggtaaccatcatttgtgtttctctgtttgtgttgtattgttctccttgatcggaatggccttcgctcaagtccaaacattcaagggtttgggttacgcagcttcaacagctgtataccagaacttgatcatcgtaatcgtgtcaatgatcgctatcggaatctatggtccgtacatccatggggcacagttgtcatacggaacagacttcccttacaacaaccagccggtgatcactgaggccttcgtatcttacccaatcgctaagaagatcaacggtatcatgaacatggtgttcgcatatggcggtgctatgatcttcccagagttgatgtctgagatgaggaggccaatggacttctggaagggtatggtttgtgcccaattgttcatctgcaccgtatacttggtatacgcaaacgttatctacgccttccagggacagtacgtggttgggcaatcttacaacggtatcgctaagtacagcttccaaacagtatgcaacgttttggcaatcatctcagggacgattgccgctgcattgtacggtaacgtaggcttgaaggtcgtctacgtgaacacagtcgagatcttgttcaagggtcctgcattcaacactagaaagggtaggccaatctgggctgctgtttcagttgtttactgggcattggcattcgttgttgctagtagtgtcccacaagttcaaacaatcagcggtttgatcgctgccatcgcaatcatgaacttctcctactccttccctttcatgttgatgttgatctactacatcaagtcagacgcaatggagggtgacaccccatacactccgggtcaaccagcagttagacaagacacctggagacattggacaaggtggcaaagaggtttgttcggtggcttgtaccatgctcaattgggatctaagcgtgttgctatcccaggtatcttgatcaaggctttgttgttggttgtatgtttggggtcatacactttgagtggtttgggtatgtacggatctggggagtctatcaaggaggtgttcgagtctactgctgctgcaacctctttcggctgtgccgcaccagtctaa

SEQ ID NO: 431 - DNA, 1728 bp, Yarrowia deformans
atgccagagaagacagtatacaacccagaggtagaggaggttcacggagaggtccaggaggcccaattgcaggtccgtactaccaacgagttgttggacgcaactgagccattccaaatctactaccactacgctgccatccaaagagctcgtgaggacgcattcccttcattcaagttcagaagtttgttcgacaagttcactccaaacagtcaggagttgttgggagaggacacacatagtgacgacaccggacctagtgacgtcgacgcagagaagcatgttggaggtatcatcagtcagattccgggagcctccaaggagttggcaatcgcaaacatgagtgcaaggaccgctacctggatgagcgtcttcttcttgatcactaccgacatcttgggacctcaaagtgctccgtgggctatctccaagttgggatggttcccaggaatcatgttgttcaccgtattgggcgtagcagcagtctacactggttggttgatctacagaatgttcttgaagttggacagtccggagttccctatgaagagtttcggagacttggctttgtgcatcttcggaaagggattcagatggggtatcgacttcttgcaatccatccaattgttgtgtaacgtcgctgtgatcatcttgggaagtggacagggattgtcccaaatctacagtccattgtgtttctccgtttggtgtatcatcttcatgattgccggaatgttgttgggccaaatcaagagattgagtaacttcagttacgtcgcaaacgcagccgtatggatgaccttgttcgtcgtcttcgcaaccatgggtatcgctgctaccaaacccccaaacttcgtcggaggtgcacaacaaaacaacttgcccaacagtaccgacccagtaagaaccaaggccatcgagaagtacccgttccaggaccaattgggagcagtcatgaacatcgtctactcctacggtggtgctatggtattcgtcgagttcatgagtgagatgagaaagccaagagagttcttgaagggtatgttgagtgcccaaggagttatcttcgtctgttacttgttgtacggattgttcgtctacgcattccaggggcaatacgtcgtcaacccagcaaaccagggcttgggaagtaagaactggcaaatcgctgtgaacgtagtatccttggtaagttctttgatcgcagctggattgtacggaaacgtcggaatcaaggtcgtctacatgaccatcatcagaagggcaattccagccttgccaggattggacgagggaatcaagggacgtatcgcatgggcattgatggtcttcttctactgggctgtagctttcgtcatcgctagtgctatcccacaattctccagtttgaccgctttgatcggagctgcatgcatcttgcagttcacctacactttccctccattgatgtacatgggattgatcatcagagaggaggcatccaagatggacatcgtagacttcgagaacagggctgtaaccaagtacgactcctggaagagttgggcaagatgggagagaggattgatgagtcgtccatggtgggtattgggaaacttcgtattgttcttggcatccttggcaaccgctatcttgggaatctacagttctatctacagtttggtccaagcattcaacgctccaggagctactacggttagtttcggatgtaacccaccagtcgcataa

SEQ ID NO: 432 - protein, 584 aa, Zygosaccharomyces bailii
MSKIFPVASHGLSLSDLKSLSEREDRILDKNVSEHEKAECLQVVRGEIVSNESDKKLHTLPLQAYFHYASIQREYEKAKDYEGLYITQNEQMYTDGQCNFSPAKLETQRLLRIAKSYSVFFLITTDILGPANAPYAVAQMGYVPGVILYVLFGVAASFCGWLLNHCYCKVDSNNYPVRTFSDLAARMVAPWFRYPFALLQFIQMLLACGSLLLGTAQALSQMLIVNRGKDNFCFTVDILVWALLCMIVGQISSLGKFAHIANTAVWMNIAICIITMVGVAVGGPYYGIFQQYGKGPPYFQLGTFNPLPITKYAITPGTVSDKIGGMNNMVFAWGGATIFCEVMAEMKRPMDFWKGMLCGQSLILVIYLLYALFVYSYNGQFTYVTANQGIGSIPLQNATNVLTIITGLIAMLLYGNIGIKVVYQGFLVPDFRFPSLTSRKGTITWGLFVIVYWAICYIIGTAIPSVSTLLSIIGSFCVLNFSYTFPFLFALCLLCRVDAGLVDQFDPRTFIVTKGDSYFHGLSRWKRAFGHGGPYRCLLKLAFFILFLAALATCGLCTYSAITGAIAAYQTNTAQPFTCSSPVG

SEQ ID NO: 433 - protein, 583 aa, Zygosaccharomyces kombuchaensis
MSKLVPIASHSLSLHSPRSYEKDEADVVLQASLDHEKGEYVDVMGREIISDEDDKKLHTLPLQAYLQYADMQREFERSKDFEGLYIAQKEQMYTDPQSNISPEKLESQRIVRVAKAYSVFFLITTDILGPSNAPYAIAQMGYVPGVILYVVFGLAAAFCGWLLNYCYCKVDSNNYPIRTFSDLAARVVAPWFRYPFALLQFIQMILNCGLILLSTAQAVSQMLIVNRGKDNFCFTVDILVWALLCMLVGQIRSLGKFAHIANSAVWMNIAICIVTMVGVAVGGPYYEIFDQYGMTAPYFKTGTFDPLPIAQYAITPGTISDKIGGMNNMVFAWGGATIFCEVMAEMKRPMDFWKGMLCAQSLILVVYLFFGLFVYSYNGQFSYVTANQGIGSVGLQNAGNVLSIISGIIAMILYGNVGIKVVYQGFLMPDFKFPSLTSRKGTIAWGVFVVVYWAVAYILGTAIPSISALVSIVGAFCILNFSYTFPFLFGFCLMCREDAASADRFDFKTLTVEKADTYMHSWSRWRRALLYGGMKRTFIKISYFFLFLASLATCGLCSYSAVTGAIAAYQTTSAAPFTCTSPV

SEQ ID NO: 434 - protein, 581 aa, Lachancea fermentati
MSKLVPIISPSLSLRALDETDKEKVYQSSLDHEKGETFDVSGREIISSTNEKKAHLLPLQAYTHYASIQREYEKANDLDTLYAVQREQMYTDPHSNVSHSKLDSQRMLRMAKAYSVFFLITTDILGPSNAPYAVAQMGWVPGVILYVLFGVAAAFGGWLLNYCFCKVDSNNYPIRTFSDLAARVVAPWFRYPFALLQFIQMILNCGLLLLSTAQSVSQMLVVNRGGDHFCFTVDILVWGLLCMIIGQISSLGKFAHIANSAVWMNIATCIITMVGVAVGGPYYGIFEQYGQAPPYFETGTFNPLPIKQYAITPGTISDRISGMNNMVFAWGGATIFCEVMAEMRRPMDFWKGMLCAQSLILVVYLFYGLFVYAYNGQFSYVTANQAIGSVGLQNAGNVLTIISGIIAMVLYGNIGIKVIYQGFLVTDFKFPSLTSRKGTFAWGGFVVVYWAVAYILGTAIPSISALVGIVGAFCILNFSYTFPFLFGLCLMCRQDAAVADHFDSKSMSVEKADSYLRNWSRWKRAFGYGGTYRTLIKGSLFLLFLASLATCGLCSYSAISGAIAVYQTNPAQPFTCTSPVG

SEQ ID NO: 435 - protein, 583 aa, Zygotorulaspora florentina
MSKLIPIASPSLSLSTSKAYYEMNKEKAYQGIDDHEKGEYVDVSGREIVSNENDKKARHLPLQAYFHYADIQREYEKLNDGDGLYAAQREQMYTDPNSNISPEKLDSQRMLRIAKAYSVFFLITTDILGPSNAPYAVAQMGWVPGVILYVLFGVAAAFGGWLLNYCFCKVDSNNYPIRTFSDLASRVVAPWFRYPFALLQFIQMILNCGLLLLSTAQSVSQMLIVNRGKDDFCFTVDILVWGLLCMIIGQISSLGKFAHIANSAVWMNIATCIITMVGVAVGGPYYGIFEQYGQGAPYFKTGTFDPLPIQQYAITPGTISDKISGMNNMVFAWGGATIFCEVMAEMKRPMDFWKGMLCAQSLILVVYLFYGLFVYAYNGQFSYVTANMAIGSIALQNAGNVLTIISGIIAMVLYGNIGIKVIYQGFLVSDFNFPSLTSRKGTFAWGAFVLVYWAVAYILGTAIPSISALVGIVGAFCILNFSYTFPFLFGFCLLCRQDAALIDNFDPTSLTVEKADSYLRDWSRWKRALGHGGTYRTLIKVSLFLLFLASLATCGLCSYSAISGAIAVYQTNPAQPFTCTSPV

SEQ ID NO: 436 - protein, 583 aa, Zygosaccharomyces rouxii
MSGLVPIASYGLSPNASRAFDEMEKEKARLSPPDHEKGDYVDVSGREIVSDENGKGRHLPLQAYSYYADIQREYEESKDYDGLYAVQREQMYTDTHSNLTPSKLDSQRMMRLAKAYSVFFLITTDILGPSNAPNAVSQMGYVPGVILYVLFGVAAAFGGWLLNRCFCKVDSNNYPIRTFSDLAARIVAPWFRYPFGLLQFIQMILNCGLILLSTAQAVSQMLVVNRGKDDFCFTVDILVWALLCMIVGQIRSLSRFAHIANFAVWMNIAVCIITMVGVAVGGPYYGIFNQYGKGPPYFEPGTFNPLPIAKYAITPGSTADRIAGMNNMVFAWGGATIFCEVMAEMRRPMDFWKGMLCAQSFILVVYLFFGLFVYSYNGQFSYVTANQGIGSKALQNAGNVLTIVSGLIAMIMYGNVAIKVIYQGFLVADFGFPSLTSRMGRITWGIFVVVYWAVAYILGTAIPSISALVQIVGAFCILNFSYTFPFLFGFCLLCRQDAATADEFDPKTLNVVRVDSYLRNWSRWKRAITHGGTLRMLVKISLFLLFLASLATCGLCSYSAITGAIQVYQTNTAQPFTCRSPVS

SEQ ID NO: 437 - protein, 584 aa, Zygosaccharomyces rouxii
MSKLVPIASHSLSPDTSGPYEEGEKGNAYQKTSDNEKGEYVDVSGREIISDEHRKQPRQLPLQAYSHYADIQREYERSKDYDGLYAVQREQMYTDANSNLSPTKLDSQRMMRIAKAYSVFFLITTDILGPSNAPNAISQMGYVPGVILYVVFGIAAACGGWLLNHCFCKVDSNNYPIRTFSDLASRVVAPWFRYPFGLLQFIQMILNCGLLLLSTAQAVSQMLIVNRGKDNFCFTVDILVWALLCMIAGQISSLGKFAHIANSAVWMNIAICICTMVGVAVGGPYYGIFQQYGKGPPYYYPDTFNPLPIVKHAIAPGSLGDRIAGMNNMVFAWGGATIFCEVMAEMKRPMDFWKGMLCAQSLILVVYLFYGLFVYTYNGQFCYVTANQAIASVGLQNAGNVLTIVSGLIAMVLYGNVAIKVIYQGFLVADLGFPHLTTRKGTIAWGLFVIAYWAVAYILGTAIPSISALVQIVGAFCILNFSYTFPFLFGFCLLCRQDASLADKFDLKTLTVEKADSYLRNLSRWKRAIAHGGTRRILIKCSLFLLFLASLATCGLCSYSAITGAIQAYQTNTAHAFTCTSPVG

SEQ ID NO: 438 - protein, 584 aa, Lachancea cidri
MSKLVPIASHSLSLHNSKIYDEGENKKGHHGNAEDEKGEYFDVSGREIISDESGKHARQLPLQAYFYYANIQREHEKAKDFDGLYAVQREQMYTDALSNLSPSKLDSQRMLRMAKAYSVFFLITTDILGPSNAPNAISQMGYVPGVILYVLFGVAAAFGGWLLNHCFCKVDSNNYPIRTFSDLAARIVAPWFRYPFGLLQFIQMILNCGLLLLSTAQSVSQMLVVNRGKDNFCFTVDILVWALLCMIAGQIRSLGKFSHIANFAVWMNIAICIITMVGVAVGGPYYGIFEQYGQGSPYFETGTFTPLPIVKYAITPGALGDRIAGMNNMVFAWGGATIFCEVMAEMKRPMDFWKGMLCGQSLILVVYLFYGLFVYSYNGQFCYVTANEAIGSIALQNAGNALTIITGLIAMVLYGNVAIKVVYQGFLVADFGFPSLTSHKGTIVWGIFVVVYWAVSYILGTAIPSISALVQIVGAFCILNFSYTFPFLFGFCLLCREDAAVADHFDIKTLTVEKADSYLRNWSRWKRAIGYGGAYRVFVKVSLFLLFLGSLATCGLCSYSAVTEAIAAYQTNTAKAFTCTSPVG

SEQ ID NO: 439 - protein, 584 aa, Zygosaccharomyces pseudobailii
MSKLVPIASHSLSLNTSKAEEEGEKENVLQTASDHEKGEFIDVSGREIISDENDKKAHQLPLQAYTYYADIQREYERSKDYDGLYAAQREQLYTDSNSNLSPSKLDSQRMMRIAKAYSVFFLITTDILGPMNAPNAVSQMGYVPGVILYVLFGVAAAFGGWLLNHCFCKVDSNNYPVRTFSDLASRVVAPWFRYPFGLLQFIQMILNCGLLLLSTAQAVSQMLVVNRGEDRFCFTVDILVWALLAMIAGQISSLGKFAHIANLSVWMNIAVCIITMVGVAVGGPYYGIFQQYGQISPYFEPGTWNPMPITQYAIAPGTIGDKIGGMNNMVFAWGGATIFCEVMAEMRRPMDFWKGMLCAQSLILVIYLFYGLFVYSYNGQFCYVTANQAIGSKALQNAGNVLNIISGIIAMVLYGNVGIKVIYQGFLVADFGFPSLTSRKGTFMWGGFVIVYWGIAYILGTAIPSIGALVSIIGAFCILNFSYTFPFLFGFCLLCRQDAATADEFDLKTLTVVQADSYLRNWSRWKRAIGYGGAFRVFVKISLFFLFLASLATCGLCSYSAIVGAIADYATNTAQPFTCNSSVS

SEQ ID NO: 440 - protein, 584 aa, Torulaspora delbrueckii
MTSLIPIASPGLSANTERAYTEIKKDHIYQDSVEQEKGEFVDEFGREILANESEKFGHKLPLQAYTYYADIQREYERSNDQDGLYAAQREQIYTDYFSNLSHSKLDSQRLLRITKAYSVFFLITTDILGPSNAPYAVAQMGWVPGVILYVLFGVAAAFGGWLLNYCFCKVDSNNYPIRTYSDLAGRVVAPWFRYPFAILQFIQMILNCGAILLSTAQAVSQMLIVNKGRDPFCFTVDILVWALLCMILGQIRSLGRFAHIANTAVWMNIAVCIITMVGVAVGGPYYGIFQQYGQGPPYFQSGTFNPLPITQHAITPGTVSDKIAGMNNMVFAWGGATIFCEVMAEMKRPMDFWKGMLCAQSLIMVVYLFYGLFVYAYNGQFSYVNANQAIGSKGLQNAGNVLTIITGIIATVLYGNIGIKVLYQGFLITDFNFPSLSSRKGAVAWGGFVIIFWAIAYILGTAIPSVSAIVGIIGSFCILNFSYTFPFLFCFCLLCRQDAALNDTFDQKTLSVEKADSYWRNWSRWKRSIGHGGTFRVTLKVSLLLLFLASLATCGLCSYSAITGAIEVYQTNTAQPFTCNSPVG

SEQ ID NO: 441 - protein, 577 aa, Lachancea meyersii
MSKLVPIASPRLHQADELAGEKDPRYSSEEPKEGYVTGLEVVSNEGPNQRKHLPLQAYMHYADIQREFEKAGDENGLYASQEKQMSTDPHSNVTTAKLDTHRSLRIAKVYSVFFLITTDILGPSNAPYAVAQMGWAPGVILYVLFGIFAAFGGWLLNRCYCKVDSNNYPIRTFSDLAGRLVAPWFKYPFAILQFIQMILNCGVLLLGTAQAVSQMLIVNRGQDNFCFTVDILVWSLLCMIVGQIKSLGRFAYIANSAVWMNIAICIITMVGVAVGGPYYGIFEQYGKGLPYFQPGTFDPLPIKQYAITPGTISDRISGMNNMVFAWGGATIFCEVMAEMRRPMDFWKGMICAQILILVVYLFYGLFVYGYDGQFSYVTANQGIGSIGLQNAANVLNIITQLIAAVLYGNVGIKVFYQGFLVSNFDFPSLDSRKGTFAWGIFVFIYWSIAYIIGTAIPSISSLVSIIGSFCIFNFSYTFPFLFALCLLCRRDASLADRFDPITMTVEKADSYYRNWSRWKRAFGHGGVTRTLIKLSLLLLCLASLATCGLCSYSAIEGAIAAYATNFAQPFTCASPVA

SEQ ID NO: 442 - protein, 578 aa, Lachancea nothofagi
MSKLVPIASPGLHTSNYEGTREKEHPLSTNDSKEDYVTGIDAISNESKKRSGHLPLQAYIHYAEIQRQYEKADDSEGLYALQQEQMTTDPNSNISTAKLNTHRTLRIAKVYSVFFLITTDILGPTNAPYAVAQMGWAPGVILYVLFGVFAALGGWLLNRCYCKVDSNNYPIRTFSDLAGRIVAPWFKYPFAILQFIQMILNCGVLLLGTAQAVSQMQIVTRGHDGLCFTVDILVWGILCMILGQIKSLGKFAYIANSAVWMNIAICIITMVGVAVGGPYYGIFQQYGQGPPYFKTGTFDPLPIVQYAVAPGTISDRISGMNNMVFAWGGATIFCEVMAEMKRPMDFWKGMICAQILILVVYLFYGLFVYGYDGQFSYVTANQGIGSIGLQNAGNVLNIITQIIAAVLYGNVGVKVFYQGFLVSNFKFPSLDSRKGTLAWGSFVVIYWAVAYIIGTAIPSVSALVSIIGAFCIFNFSYTFPFLFAFCLLCRQDAGLTDRFDPLTLTVEKADSYWSGLSRWKRALGQGGIKRSLIKISLLLLCLASLATCGLCSYSAIEGAIAAYQTNFAQPFTCASPVA

SEQ ID NO: 443 - protein, 581 aa, Lachancea mirantina
MSKLVPIASPGLQMSFDDEMVREKEHVRSMDDVDVKDGYVTGHEVISNGHVGNEKPLPLQAYIHYAEIQREYEQANDLDALYAAQKEQMITDPNSNVSDSKLDTHRALRIAKAYSVFFLITTDILGPTNAPYAVAQMGWAPGVILYVLFGVFAAFGGWLLNRCFCKVDSNNYPIRTFSDLAGRMVAPWFKYPFAILQFIQMILNCGVLLLGTAQAVSQMQIVTKGKDGLCFTVDILVWALACMIIGQIKSLGKFAHIANSAIWMNIAICIITMVGVAVGGPYYGIFEQYGQGPPYFEPNSFNPLPIAHYAVSPGTISDRISGMNNMVFAWGGATIFCEVMAEMRRPMDFWKGMICAQLLIMIVYLFYGLFVYGYNGQFSYVTANQGIGSIGLQNAGNVLNIITQIIAAVLYGNVGIKVFYQGFLVPHFRFPQLTSRKGTFAWGGFVVVYWAVAYIIGTAIPSVSALVSIIGAFCIFNFSYTFPFLFTFCLLCRTDAGLGDRFDLSTLTVEKGDSYWRNWSRWKRAFGHGGYKRSLMKLSLMLFCLASLATCGLCSYSAIEGAIAAYATNFAQPFTCASPVA

SEQ ID NO: 444 - protein, 570 aa, Lachancea sp
MATKLVPISSPGLHLGDSDGLREKEARLSGTEVSSSEEPHITHKTLPLQAYMHYAEIQRDYERVNDTEGLFAAQAEQIEADPHSNMSSVKLDAQRALRIAKASSVFFLITTDILGPTNAPYAVAQMGWAPGIILYVLFGIFAALGGWLLTRSFCKVDSNNYPIRTFSDLAGRAVAPWFKFPLAILQFIQLILNCGVLLLGVAQAVSQMQIVTKGHDGLCFTVDILVWALLCMAVGQIRSFRKFTPIANSAVWMNIAICIITMVGVAVGGPYYGIFTQYGKGAPYFEPDSFIPLPVKHHAIAPGTISDKISGMNNMVFAWGGATLFCEVMAEMKKPMDFWKGMICAQGLIMVVYLFYGLFVYGYNGQFSYVTANQGIGSIGLQNAANVLNIITQLIAAVLYGNVGVKVFYQGFMVPYFRFPELMTRKGTVVWGFFVTGYWAIAYILGTAIPSVSALVSIIGAFCIFNFSYTFPFFFAFCLLWRQDAGLNDTFDLTTLTVEQGDSYLSGFSRWKRAIAHGGMRRFTIKLALMLVCLASLATCGLCSYSAIEGAIDAYKTNPAQPFTCTSPVT

SEQ ID NO: 445 - protein, 569 aa, Lachancea lanzarotensis
MATKLVPIASPGLHFSDDDALREKEARISGIEVSSEESHFNDKNLPLQAYIHYAEIQRDFERRNDLDGLYAAQAEQIESDPHSNVFSVKLDSQRALRIAKASSVFFLITTDILGPTNAPYAVAQMGWAPGVILYVLFGVFAALGGYILNRCFCKVDSNNYPIRTYSDLAARTMAPWTKFPLAILQFIQLILNCGVLLLGTAQAVSQMQIVSKGHDNFCFTVDILVWALLCMIVGQIKSFGKFSYIANSAVWMNIAICIITMVGVAVGGPYYGIFQQYGKGAPYFEPDSFNPLPIKHYAITPGTISDKIGGMNNMVFAWGGATIFCEVLAEMKRPMDFWKGMISAQSLIMVVYLFYGLFVYGYNGQFSYVTANQGIGSIHLQNAANVLNIITQLIAAVLYGNAGVKVFYQGFMVPYCKFPGLMSRRGTIVWALFVVVYWAIAYILGTAIPSVSALVGIIGAFCIFNFSYTFPFLFAFFMLWRQDAGLDDQFDVSTLTVQRADSYLSGLSRWKRAIGHGGYKRFALKLALMLVALASLATCGLCSYSAIEGAIASYQTNFAQPFTCTSPVA

SEQ ID NO: 446 - protein, 568 aa, Lachancea dasiensis
MATKLVPIASPGLHFSDDEGLREKDAPMSGVEAVTSEFQGANKNLPLQAYMHYADIQRDYERVDDMDGLYAAQQEQITADPHSNLSLVKLDAQRSLRIAKAYSVFFLITTDILGPSNAPYAVAQMGWAPGIVLYVLFGIFAAFGGWLLNRCYCKVDSNNYPIRTFSDLAGRTVAPWFKFPFAILQFIQMILNCGVLLLGTAQAVSQMQIVTKGTDGLCFTVDILIWGLLCMIVGQIKSLGRFAHIANSAVWMNIAICIITMVGVAVGGPYYGIFKQYGMGAPYFQDNSWIPLPIQHHAVAPGSISDKIGGMNNMVFAWGGATIFCEVMAEMRRPMDFWKGMICAQSLIMIVYLFYGLFVYGYNGQFSYVTANQGIGSTGLQNAGNVLNIITGLIAAVLYGNVGIKVFYQGFMVPYFRFPNLMTRKGTFAWGGFVVLYWSIAYILGTAIPSISALVGIIGAFCIFNFSYTFPFLFAFCLLCRQDAGLTDRFDPLTLTVEKADSYLNVSRWKRALGHGGFKRFAVKLSLLLLCLASLATCGLCSYSAIEGAIESYQTNLAQPFTCTSPVG

SEQ ID NO: 447 - protein, 572 aa, Wickerhamiella domercqiae
MSLVPMASYGLTPHASKAYDESEKVRDVEVKQEGEVLSRENDKHTHKLPLQAYTYYAGIQRKYEESRDIDGLYETQMQQIHTDPNCNLSVEKLDSQRMLRLAKAYSVFFLITTDILGPSNAPYAIAQMGYVPGVILYVLFGAMAAFGGYLLNYCFCKVDSNNFPIRTFSDLASRAVAPWFRYPFGALQFVQMIMNCGLLLLSTASSVAQMQVTNTGKNHLCFTVGILVWGLLAMVVGQIRSLSRFAHIANFSVWMNIAICIITMVGAAISGPDYGVFSANYGYTEPYFNPLTQEPLPIAKAAIAGGDLADRIAGMNNMVFAWGGATIFCEVMAELERPMDFWKGMLGAQCLILVVYLFFGLFVYSYDGQFSYVQANMGIISTGLQTASNVLNVVSGMIAAILYGNVGIKVIYQGFLVSDFGFPKLTTKKGMVIWAIFVVVYWGIAYVLGTAIPSISVLVSIIGAFCILNFSYTFPFLFLFSLMWRQDAGLGDEFDSSTLTVTRGDSYLRNWSRWKRAATEGGSVRTLVKVAVFLLFLASLVTCGLCSYSAIEQAIATYATNQAQPFTCIANV

SEQ ID NO: 448 - protein, 566 aa, Wickerhamiella sorbophila
MSLVPISSFSGALAPKVSKQIFEESSDGDDEKNVYEHSDEVEYHDTNKLPLQVYTHYAEIQRSYEEDNRLDELYEAQELQRKTDPHANLTTAKLESQRQLRAAKIYSVFFLITTDILGPSNAPYAIAQMGYVPGVILYVLFGCMAAFGGYLLNRAFCRLDSNNYPIRTFSDLAARCIGYWFRYPFAILQFIQMIMNVGLILLGTATAVAEVIVQYHGHNTFCFVVNILVWALFGMLLGQIKTLHRFAHIANSAVWMNIAICIITMVAAATTTPYYSIFWANYGHDYPYNTTDILRYAITPGTLSTRIAGMNNMVFAWGGATIFCEVMAELKRPMDFWKGMICGQALILVVYLFFGLFVYSYWGQWSYVTANLGIAKQGLQVAGNILSIISGLLAAVLYGNVGIKVLYQGFLVADFNFPKLTTKKGTIYWAIAVVIYWAVAFIIGTAIPSISALVGIIGAFCIFNFSYTFPFMFNFVLMVREDAGRGDTFDIQTITVTRGDTWRNASRWKRGLFYGGTYRSMVKLAFFLLTLASLATCGLCSYSAIEQAIAVYQTNVATSFGCSANV

SEQ ID NO: 449 - protein, 568 aa, Pichia manshurica
MSVGIAPLGSLGVSPRTSRVYEEFVEKKKHLEGTISSVETVSQDDEKHTHDMPLQAYLHYAGIQREYEKAKDYGKLYEIQSLQMQTEPKCNLSEDKLQLQRKLRIAKSSAVFFLITTDILGPYNAPYAIAQMGYVPGVILYVLFGAFAAICGYLLNICFVKTDSNNFPVRTFADLSARAIGSKVRVFFALFQFIQMIMTVAQCVLGAASSLAQLLDTNLGRNTFCYTVNILVWSILGMVVGQIKTLARFSYIANLAVWITVAVCVMTMVGAATSGPNYQIFWANYGKVWPYTVPVFKTAIMSGNLSARVSGMNNMVFAWGGATVFAEVMAELKRPMDFWKGMVVAQAFILVVYLFFGLFVYSYLGQYSFVTAYQSVTSVKLQNAMNIIVIISYMLAAVLYGNVGLKAAYNGIFVPDFNFPLLSTRKGSVLWPGMVVIYWAVAYIIGSAIPSISTLVSIIGAFCIYNLSYSFPFMFILALMWRSDAGSLDSFDLTSMTVSKVDSYRNWSRWQRAMSSGGWKRTVVKLSLFLLCLASLANCGLCAYTAIEGAIETYRTSVAAPFTCVAPV

SEQ ID NO: 450 - protein, 568 aa, Pichia membranifaciens
MSAGIAPLGSFGVSPRVSRIYDDFDEKKEHLDGTVSSVEAVSHSNEKNVHNLPLQAYLHYAEVQRECEKENDLDKLYDIQTEQMRTEPKCNLSEEKLQVQRKLRIAKSAAVFFLITTDILGPFNAPYAVAQMGYVPGVILYVLFGIFAAICGYFLNICFVKTDSNNFPIRTFADVSARAISGKVRVFFAIFQFIQMIMTVAQCVLGAASSLAQLLDTNLGRNTLCYTVNILVWSILGMIVGQIKTLARFSRISNLAVWITVAVCVMTMVGSATSGPNYQIFWSNYGKVWPYTVPVFKTAIMTGSLSNKISGMNNMVFAWGGATVFAEVMAELKRPMDFWKGMVCAQAFILIVYLFFGLFVYSYLGQYCFVTAYQSITSVKLQNAMNVIVIISFMLAAVLYGNVGLKSAYNGIFVPDFNFPLLSTRKGNLLWPVLVVVYWAVAYIIGSAIPSISTLVSIIGAFCIYNLSYTFPFMFLLALMWRMDAGSLDAFDLVTMTVTKADTYKNWSRWKRAITSGGWKRTLAKVALFLLSLASLANCGLCAYTAVESAIETYSNSVASPFTCTAPV

SEQ ID NO: 451 - protein, 576 aa, Candida apicola
MGIFGKKKVDEKPPSDVPSSSDEAPNEKVVEGHVNNHHTNNIAPDFDDIYDDLEVEVKETHDLPLEQYMYYANIQREFEYRKDYQGLRENQAKQIADPHGNMNRVKIESQRELRKANRFAVFFLITTDILGPSNAPYGISQMGYVGGIILYVAFGCFALLGGKLLQNCFLRLDSDNYPIRTFSDLGARIFGYWSRYFVALLQFIQMILNVGIICLSSGQALAQCINSTDKNPKVCFTVQILFWALAGMVLGQIRSLRDYSYIANSAVWMNIAICVITMIGAYLFDPYGPATGFPSKGPIKRSVGTTQGLFDQMLGVDQMVFAWGGATIFCELMAEMANPREFIQGLMGADGLILVVYLFFGIFTYTCQGQYVSNPANQGIQTWELRLAANVLSLVSGVFAAALYGNVGLKVLYQGFGVPDLKFPVLTSKKGAVLWAGLVFIYWAVAYVIGAAIPQVSELSALVGSLCILNFSYTLPAAFMLTLMIREDAGQFDTYHPETATVTRIDSWKNGARWSRAMNTGSWKRKLAKAFLLFMTLGGLCLCGIGLYGAIQSMINVYGGSSNAGKAFGCKPSNYN

SEQ ID NO: 452 - protein, 577 aa, Starmerella bombicola
MSVGEKNEAYDQARLDGTSDTSESDGARRSVTGTIKELDGNVITNVTGGVIAANDDDKHTRNLPMEHYAHYAAIQREFENRKDYEGLKETQMQQLSDPQSNLSIAKIESQRELRRASPYAVFFLITTDILGPSNAPYGIRQLGYVGGIILYIAFGIFAMIGGKLLNMAFLKLDSDNYPIRTFSDLASRILGPWSRYFIAGLQFIQMILNVGIICLTTGQALAQCINSTADDPKLCFTVQILVWALLGMILGQIRSLRDFSHLANSAVWMNIAICIITMVGAARWDPYYVVTGLAPGPVVVSAGAPAGSTLFDKMLGVDQMVFAWGGATIFLEVMAEMARPREFVYGMVGADMLIMIVYLFFGIFVYSFQGQYVYVVANQGINPYGLRLAGNILTIVSGMLAATLYGNVGLKVLYQGFGVPDLGFPALTSRRGILLWAVLVVAYWGVAFIIGAAIPQVNSLSSLVGSLCILNFSYSLPALFMLALMMREDASQLDSYDPLTGSVTRHDTWGNRSRWRRAIASGTWKRHLAKLFLVIMFLGGLTLCGIGMYGAIKNMITTYGGSSSAGKAFSCSPANYN

SEQ ID NO: 453 - protein, 588 aa, Starmerella bacillaris
MKRFFNRFSAGNTSENEQEKNDASTNVYSVSDTSSSNNNNFANNEKYVSDEQAYDVPDVLTNIVVAVDDDKHTRTLPLQQYEHYAAIQREYEDRNDFEGLRECQREQLSDPHSNLSEEKIQSQIALRRASKYSVFFLITTDILGPSNAPYAMMQLGLVPGIILYIAFGVFAIIGGKLLSYAFCRLDSDNFPLRTFADLATRILGPWSRFGVAGLQFIQMILNVGIILLTTGQALAQCIKSTAEDPKLCFTVQIFVWAILGMIIGQIRSLKDFSHLANSAVWMNIAICIITMVGAATGGPNYEVAWTSSQIPKGPVDVYAVAKNDLYDRIQGIDQMVFAWGGATIFCEVMGEMARPREFVKGLIGADTLIMVVYLFYGIFVFCYQGQFTYAVANQGINQYGLQLASNILNIISGMLAAVLYSNVGLKVFYQGFGVPDLKFPKLDTIKGAIWWFVLVIIYWGVAFIIGAAIPQVASLSSLVGAVCILNFSYTLPALFVFFLIVQDDAGSLDKYDPLTGEVERYDTWKSGERWKRAFLLGGWKRIGMKIFTFILFLCGLTLCGLGMYGAIESLIEAYSDNNAVAFSCNPSL

SEQ ID NO: 454 - protein, 579 aa, Leucosporidium creatinivorum
MNVAGTLGVGDASQLGKMDEKTLHDSMVHTAPAVTGGDGKPTSLAEYLYWAEKQRAVEDADTSQVHSKGLGQLFAKINKKQLDSTETSVDEKTEHGGIDDQLVGLTERETELVNARRALRLAGWGACFYLITCDILGPFSAPYAISQVGWVPGVTLYTLFGAAAGLTGCMIGRLFCRLDSVRFPIRTYGDLALCIFGPAARHFCSVLQFIQLILNCGLICLSNGQGLSQIAKGNLCFSVCIVIWAVVGCILGQIRGLSNFSILANSSVWLNILIIILSMAFVANSPPNFESAIASYGATIASGPIVTSAVVPLPVFSQVTGVFNMVFAYGGAMIFPELAAEMRRPRDFIKGMALAQIVIFVLYLVYGCVIYGLQGQYTLALAYQGVSKYSWQTVSNVIALITGSIAAGLYGNIGLKVFYVNIVEELFKGPPLMSRGGRMLWSVLVLAFWALAFVIGTAIPGVGSLSGLVAAVCIFQFTYTFPPLLMLGLDLSIDAALADEPFTTPGVAPKQVDTWRQVSRWKRAILAGGTKRLIIKFLNFWFFIGALATAGLGMWASGTAVRQTLSAGAATSFGCAASV

SEQ ID NO: 455 - protein, 587 aa, Rhodotorula graminis
MQTAAAVGVSAPAYEVNESARDMHDMYAPASTSSRISIPEYMFWAERQRARERADTGDFHSAGLASLAAGMKGKIREKGEKGGDKSSNSDVHEVTVGGAQGDDATADLEGLSEREKELCNARRMLRVAGWATIFFLITTDILGPFNAPYAIANLGMAPGVVLYVIFGLVAGVTGVMLQHLFLKLDSVRYPVRTYGDLGGRVYGTWMRHLCSILQAIQLILNVGLICLSNGQGVAQIAEGGSGPAICFSVAVVIWAILGMALGQIRSLHGLGLLANSAVWINLLIIILSMGFIAHSPPNYAAAFASYGIPEGPVVVSARVTQPVFNQVNGLMNMVFAYGGSMIFPELLAEMRRPHDFIRSFAMAQALIITAYLVYGCYVYAMQGQYTLALAYQGVSHYSWQTVGNVLALISGAIAAALYGNIGLKVIYINIVEGLLKGPPLMTKSGRIVWGILVVFFWAAAFFIGSCIPSVGALSGVVASACIFSFSYTLPPLFVLGLYMHIDAATADEPFSTPGVAPRRRDTWKSFSRWHRAITYGGWKRTAIKVVLFLFFLAALATQGLGLWGSGTTLGQAFEKGAATSLGCTSPV

SEQ ID NO: 456 - protein, 583 aa, Rhodosporidium toruloides
MDSAALAGVAIPQQEANESEKQMDQFYQPQVGSDKISLAEYRYWAARQRERERNDTADFHSRGLASFAHTVKGKIGKGEKDHDVHVREATDSPTFDDVAADLEGLSERELELVNARRALRVAGWATIFYLITTDILGPFNAPYAIASMGMASGVVLYVVFGIIAFITGVMLHRLFLHMDSVRYPIRTFGDLGGRVFGSWMRHLCSILQAIQLVLNVGLICLSNGQGVAQIAAGGNGPAICFSVAVVIWTILGIIVGQIRSLQGLGLLANSSVWLNILIIILSMAFIAHSPPNYASAAATYGDSIGTGPVVVVARVNQPVFSQVNGLMNMVFAYGGSMIFPELMAEMRRPHDFIRSMALAQALIITCYLVYGIYVYAMQGQYTLPLAYQGVSRYAWQTVTNVIALITGAIAAGLYGNIGLKVIYINIVEGLLKGPPLMTSRGRVVWSGMVVLFWGTAFVIGSAIPSVGTLSGLVAAVCIFQFTYTFPPLFTLGYWISVDAAAGDEEFSTPGVAPRRVDNWTNMSRWSRGIFGGGMKRVLYKLGLFLFFLAALATAALGMWASGTDLREALKKGAATSFGCTAPV

SEQ ID NO: 457 - protein, 584 aa, Rhodotorula sp
MQAPAWSGAADPMMEGNANSKEMDMLHQHQPHTSKISLAEYFFWAERQRAREKRDTTVTSQPLADVGRAIKGKITKSEKGSDDGSDHKVSAEVQDADGVPDEPSGDLVGLSPYEVELCDARRALRVAGWATIFYLITTDILGPFNAPYAIASMGLGPGIALYVIFGIVAFITGCMLNNQFLHLDSIRYPVRTFGDLGGRLFGTWMRHLCSFLQAIQLILNVGLIQLSNGQGVAQIAAGHGGICFSVAVAIWCWLGIVIGQIRTLRGLGLFANAAVWINLLIIILSMAFIAHSPPNYAAAKAAYGIDQGPVQVVAVVNQPVFSQVNGLMNMVFAYGGAMIFPELMTEMRRPHDFIRGMALAQGLIIVCYLVYGIYVYAMQGQFTLALAYQGVSKYAWQTVGNVLALITGAIAAALYGNIGLKVLYINIVENTLKGPPLMSKKGRLVWGVAVILFWGVAYIIGSAIPSVGTLSGLVAAICIFQFTYTFPPLFQLALEMHKDAIRGDEAFQTAGVRPRQIDTWRQASRWRRAIFGGSTKSTILKFVYFVFFLAALATAGLGMWASGTDLRDALKTGAATSFGCTAPV

SEQ ID NO: 458 - protein, 579 aa, Microbotryum lychnidis
MSVGKHTIDDKSHSIGEKKNDVDFSNRLVAGPMDSQPVSLVEYIHWAKIQREIEAHDTTQVKTGGLGPLGKMIAQKMDKTGGKGMTVSAEVQQRMEAELEQMQGFSPHHQELSNARRMLRQAGWATVFFLITTDILGPYNSAYAISTVGLVPGVCLYALFGAAAGFTGYMIWKMFCQLDSVRFPVRHYGDLAERIYGAWARHVCSILVTFQLLFNCGIVILGNGQALTQIVKGNICFTVSIVIWAVVGAVVSFVRELHAFSVFANFSVWLNILIMILSMAFVAHSPPNIAGAIAAYGDSIGTGPVVIKAFVGGSLFNQVNGAFNMVFAYGGGMIFPEIIAEMRRPYDAIKGIACAQIFIFTVYLFYGVFIYCFQGQYTLPLAYQGVSKYAWQCIGNGISLLTVTVAAGLYANVGLKIIYTNIVESVFKGPSLMSRKGQMIWLPMVIIWWVVAWVIGTGLPGLGALTGLVGAVAIFQLSYTFPPFLMLGLTVGMDASLADEPFTTPGVAPKRIDTWRDFSRWKRGFAAGGSKRLAYKIFNVFFFIGALAIGGLGMWGTGTALAQTIKAGAASSFGCAAPV

SEQ ID NO: 459 - protein, 554 aa, Auricularia auricula
MSGPEKYDEKNGVTRAASPLATTDSSDDRVVSVTSQLAGPVLFEDYLHYAQIQRELEKQDGRTVDYPDFQDKSGNAMYPDRERVLSDLEVERINARRMLRVASWWSIFFLITTDILGPFNAPFAFASVGFVPGAILYFFMFIAATWTGALLWFMFIKLDSDRYPVRTYADLAERIFGRWARHFCTILQSIQLIFNVGLICLSSGQSLSQVSSAKLCFSVCVVVFVVVGLIIGQIRTLNDFTTLANGAVWLNLLIIFISMGIMSHSPPNIASAVATFGKERASGPVHTEAFVSQPLFDKVNGIMNMVFAYGGAMIFPEMAEMRRPMDFWKGMIAAQTLIFCAYLMFGIFVYAFQGQYTLPVSYQGISKFGFQTACNTIGMISGIIAAGLYGNIGIKVAYINIIEDWFNGPPLVSRKGRFIWFGMVTLYWSLAFVIVSAIPSVGSLAGLVAAVCIMQFTYSFPPVLMVGYEIIVDAMEGETYTPGAGTSHRIDTWRQWSRWRRGLFGGRWYIKLVHLVVALAAFSMAGLGIWGTGLAVKQSLDNGAATSFGCKPPV

SEQ ID NO: 460 - protein, 536 aa, Jaapia argillacea
MASIANIAGEGAPIKIEDADVYVVPVQPGPEVIRSTQKIPFQAYLNQAELTRAREARGEPATSNPQEKEMETPSLSSYEQELITARRALRTAGWVSVFYLITTDVLGPFNAPYAFSQVGYAPGVILYLIMGAVACYTGLILWHLFLKLDSDRYPIKTYADLAERIFGTWFKHLCSVLQSVQLIIIVGTICLSCAQSIEQIALNRKICFSVAILIWVFVGMVIGQIQTLKSYGWLANFSVWLNLIVIFASMGFVAHSPPNYASATAAYGPEVASGPIHTGVFVNLPISSKVNGIMQMVAAYGGAMIFPEFMAEMRRPMDFWKGMVCSQLLVCTVYVFYGIFVYAFQGQYTLPLAYQGVSKYAWQTMGNAIAMITGIVAAGLYGNLGIKIAYISIVEEWINGPPLMSRKGRLIWTGMVLLYWALAFIVASAIPQVQTISGLVAAIAIMQFTYTFPPLFLLGFDMVVDASKNDPGDTWTSLSRWRRAAFSRRWFFKMFNFVLFLGSVVLAGLGMYGSGVLIKVTFENGVATSFSCTSPV

SEQ ID NO: 461 - protein, 527 aa, Gloeophyllum odoratum
MASYAVPATIAGEGVAKPPSDDVSVHSYRESGKVSFQTYLDHAEQSRAREAKGETSGSESPNEKRPSLTPHEEELLNARRALRTASWASVFYLITTDILGPFNAPYAFSQVGFVPGAILYVVMGAVACYTGLILWRLFCRLDSERYPIKTYADLAERIFGKWFRHFCALLQSLQLIINVGTICLSNGQSVQQIANDHGFCFSIEILIWALVGMVVGQIRTLKNYGWLANLAVWLNLLIIFISMGFIAHSPPNYASAYQAYSVSPGPVHTSAFVSLPLYSKVNGIMQMVFAYGGAMIFPEFMAEMRRPMDFWKAMCCAQLLISTVYMMYGIYVYAFQGQFTLPLAYQGVSKYSWQTVGNVLALLTGIIAAGLYGNIGIKVAYMHIVEEWGHGPPLLSKKGRVIWFFMVILYWALAFIVGSAIPQVQNISALVAAVCIMQFTYTFPPLFLVGYEMIVDAMIDDPGDTWYNYSRWKRGFFTGRWLFKLFNLVLFLGALSMACLGMYGSGESIKAAFTTSHATSLGCSPPV

SEQ ID NO: 462 - protein, 528 aa, Trichaptum abietinum
MASTALQIADDRKHVVLDEKTAGVADGSSASSVHDDLRLPSLAEYMQQAELSRATEAHVHGSESPEEKLDIEDDLVNARRALRTASWAAIFYLITTDILGPFNAPFAFSQVGYVPGAILYVVMGLVACYTGLILWRLFCSLDSHRYPIKTYGDIVERIFGRQPKYFCDALQSLQLVINVGTICLSNAQSVEQIANNHKFCFSIAILMWALVGMVIGQIRTLKSYGWLANSAVWINLLIIFISMGFIAHSPPNFVSAMAAYGIGPGPIVKSKFVSLPLFNKVNGIMNMVFAYGGAMIFPEFMAEMRRPMDFWKGMCCAQLLITVVYMMYGIYVYSFQGQFTLPLAFQGVSKFSWQTVGNVLALITGIIAAGLYGNIGIKVAYYQIVEKWFKGPKLMTSKGRVVWTFMVLIYWALAFIVGSAIPQVQTISGLVAAICIMQFTYTFPPLLWAGFHMRLDAAINDPGDSWYSLSRWRRALFTGKWHFKLFNLVLFLASLSMACLGMYGSGKAIQQTFQSGGAATSFGCGSPV

SEQ ID NO: 463 - protein, 545 aa, Marasmius oreades
MASNEKDNGIDAVGEKREIASNEQTTDLPAGTSVDRDGDLTLRDYMRFAAITRSKENAGPGGFREPAPGILGKSGVDQQEIDAARRALRTAGWMSVFYLITTDILGPFNAPFALSQVGYVPGTILYVVMGAAACYTGLILSNLFCKLDSFEYPVRTYADLGGRVFGHWFKHMCTALQSLQLVINVGTICLSNAQSVEQIANHHKFCFSAAIIIWTIVGMVIGQIRTLKSYGWLANSAVWLNLTVIFTSMGFVAHSPPNFASAKAAYGIDPGPIIKETFVSLPLFSKVNGIMNMVFAYGGAMIFPEFMAEMRRPMDFWKGMVCAQLLITTVYLLYGLFVYSFQGQYTLPLAYQGVSKQAWQDVGNVISVITGIIAAGLYGNIGIKVAYYQIVEGWFHGPALVSRRGKLVWPFVVIIYWALAFIVASAIPQVQTISGLIAAICIMQFTYSFPPLIWLGYQIRLHAEGLHDVNGDSGSDNSDPGDSYLTWSRWKRGLFGGKWYFNLFNLVFFLGSTAMACLGMYGSGTAIRETFKTAQATSFGCKSPV

SEQ ID NO: 464 - protein, 542 aa, Gymnopus alpinus
MSEKIVQDEKASGTESPELAPELKEETVLIEQPSFRDYLIYASVSRLNESKPHETPMEIKHIRKTEHQRELDQARRALRTATWVSIFFLITTDILGPFNAPFAFSQVGYVPGAVLYVVMGGIACFTGLQLWQLFCKLDSHEFPVKTYGDLSGRILGTPFRHLTTVLQSLQLIINVGVICLSNAQSVEQLAAHHEFCFSISVLIWAFVGMVLGQIRSLQKYTYLANSAVWINLLIIFTSMGFVAHSSPNFGAALASFGTLPGPVDTEKFVSLPIFDKVNGIMNMVFAYGGAMIFPEFLAEMRRPMDFWKGMVCAQLLICIAYLLYGAFVYSFQGQFTLPLAYQGVSKQSWQDVGNVLALITGIIAAGLYGNIGIKVAYYSIIEDWFKGPALTSRAGRVIWSIMVIVYWSLAFIVGSAIPQVATVSGLVAAICIMQFTYTFPPLMMLGYKMQIGAAGLVEEDSLALGEVIDPSTPSKDPGDTWRQWSRWQRGFFAHQWYINLFNLILFLASLSMACLGMYGSGTAIKVTFENGAATSFGCTTPV

SEQ ID NO: 465 - protein, 564 aa, Pholiota squarrosa
MAYNIANVAMTEPIHEKEKADRSSSINSPATVSTRSGEIAFEDYLHFAALQRLEEDGGLEKAAGKQSWFHRLSAHKGPNVNVDISDAKSYPMTEYEEDQAQASKALRLASWASVFYLITTDILGPFNAPFAISQVGWVPGVVLYFVMGAMALYTGLILWRLFIRLDSARYPVKTYADLAERIFGRAARHAVNALQSLQLIINVATICLSNGQALSQIANFKLCFSVCIVIWAIVGFVIGQIRTLKAYGWLANSAVWINLLIIFTSMGFVAHSAPNFTAAKTSLGVDPGPVITAKFTSLPLFLKINGIMNMVFAYGGAMIFPEMMAEMKRPMDFWKGMTMAQALIFVAYLLYGCFVYAFQGQFTLPLAYQGVSKHSWQTLGNVLSLITGIIAAGLYGNIGIKVVYINIVEDWLKGPRLMTPKGRIVWSGLVFAYWSLAFIVGSAIPQVQTITGLIAAIAIMQFTYSFPPLLRLGYDIITDAMAVDNRHAPGMGTKARIDTWNQWSRWKRGLFGGRVWFKLFNLVIFLGGLSMACLGMWGAGEAIKSTFQLNGAATSFGCRSPLQG

SEQ ID NO: 466 - protein, 572 aa, Agrocybe cylindracea
MTSTGIANAALSEPIHKHRSDEKVTLSEREHDSLSTDSAARRDDVVFEDFLHYAALQRLEEDEVAGKYAAASTHGNWLSRLSAHKGPNINVVVGERKAEIPMTADEDERANASRALRLAGWGSIFYLITTDILGPFNAPYAISQVGWVPGVVLYFVMGAMALYTGLILWRLFIRLDSVRYPLKTYADIAERIFGRGARHVVNVLQSIQLLVNVATICLANGQSLSQISKGKLCFSVCIVIWTIVGFVIGQIRTLKNYGWLANGAVWLNLIIIFTSMGFVAHSPPNFAAAMQSLGVSPGPVQTQLFGTLPLFKKVNGIMNMVFAYGGAMIFPEMMAEMRRPMDFWKGMTLAQLLIFVAYLLYGAFVYAFQGQFTLPLAFQGVSKFAWQTLGNGIALVTGIIAAGLYGNIGIKVIYINIIEDWFGGPRLMTPKGRIIWTTLVFAYWALAFIIGSAIPQVQTITGLIAAIAIMQFTYSFPPLLRFGYDVITDAMSQDAAYVPGSGASGRVDSWKERSRWKRGLFGGRWYFKLFNFILFLGGMVMACLGMWGAGESIKATFEQSGAATSFGCTAPV

SEQ ID NO: 467 - protein, 565 aa, Psilocybe inquiline
MAYNIANVAQTPTGFVNEKSEKGHDSLRESASPDPGAPHGPVVFEDYLHYAAKQRLEEDLRLGIAPDESTSWFSSLSSHKGPNVNVKVAEVRDHPMTALQEEDARASRALRLAGWMSIFYLITTDILGPFSAPFAISQVGWVPGVVMYVVMGGMALYTGLILWRLFIRLDSERYPIRSYGDMAERLFGQAARQVVNVLQSIQLVVNVATICLSNGQALSQITNAKLCFSVCILIWALAGFVIGQIRTLKNYGWLANSAVWINLVIIFTSMAFVAHSPPNFAAALSAFGTPEGPVVTNKFTTLPLFLKVNGIMNMVFAYGGAMIFPEMMAEMRRPMDFWKGMTLAQALIFSAYLLYGCFAFQGQFTQALAYQGVSKHAWQNVGNILSLITGIIAAGLYGNIGIKVAYINIVEGWFNGPRLMTTRGRMIWTVMVCVYWSLAFVIGSAIPQVQTISGLIAAIAIMQFTYSFPPLMRLGYDVITDAMSADAEYVPGTGNACRVDSWRDWSRWKRGIFGGRVWFKLFNLIIFLGGIAMACLGMWGSGKSMVHTFQIAGAATSFGCKSPVA

SEQ ID NO: 468 - protein, 579 aa, Sphaerobolus stellatus
MATALYNSAISEPIHQPFTSEKEKDVERDDSVSHEFSGAGDLFHPVFEDYLHYAAIQRLKEDGIEVGKVAPETIEEKRNWFSRLSEHKGPNVNVNVRHITPRKLTPDEEERENAARALRLAGWAAVFYLITTDILGPFNAPFAISQVGWVPGIILYFFMGLIALYTGLILWRLYIRLDSLRYPLRTYADIAERIFGKAARHTCTILQSVQLLVNVATICLSNGQALSELTQNGTGMGGVCFSVAIVVWAFLGMIVGQIRTLKNFTWLANSAVWINLIIIFTSMGFVAHSPPNFAAAKTSLGVDQGPVITTKFGHLPLFMQVNGIMNMVFAYGGAMIFPEILAEMRRPMDFWKGMAMAQALIFVAYLLYGAFVYAFQGQFTLPLAYQGVSNFKWQSVGNALSLVTGIIAAGLYGNIGIKVVYINIIEDWFNGPRLMTFKGRIIWSSLVILYWALAFIIGSAIPQVQTITGLIAAVAIMQFTYSFPPLLRLGYDVITDAMAADKEYVPGQGASGRVDTWRNWSRWRRGLFGGRWYFKLFNLLIGLGGLAMACLGMWGAGESIKAVFALSGAATSFSCKSPV

SEQ ID NO: 469 - protein, 557 aa, Mycena chlorophos
MADITPPSEKIDEKRSEEGVSSGVDSLKSNTDIGPVWFETYLYYAALQRHEEDPKPPKGISKLFYDLSSHKGSNVNIDIGPHIERERAIPLEEREAAARALRLASWSSVFFLITTDILGPFNAPYAISQTGWVPGIILYFFMGAIAAYTGLILWRLYIRLDSNRYPIRSYGDIMHRIYGTTARRIANVMQSIQLIIVVGIICLANGQSVSQIAKGHICFSLAIIIWAIFGCVIGQIRTLRNYGWLANVAVWINLLIIFTAMGFVSHSPPNFSAAQSSLGVSPGPVVTEKFAKVPLFDQVNGIMNMVYAYGGAMIFPEMLAEMRRPMDFWKGMVMAQMLIFSAYLLFGAFVYSQQGQFSLPLAYQGVSKYAWQTIGNALSLITGIIAAGLYGNIGIKVVYHNIIVDWFHGPPLMSMKGRIIWSFLVLIYWSLAFVLGSAIPQVNTINGLVGAAGIMQFTYTFPPMLRFGYDVITDAMAGDGTYDPLTNQPYRVDTWRDWSRWKRGLFSGRWYFKLLNFGMTLAAIAMAALGLWAAGEAAKQTFAFQGAATSFGCTAPV

SEQ ID NO: 470 - protein, 569 aa, Mortierella sossauensis
MSKEFPGVIELHGESGKHEIELMNEVPGHHHTSYTDIKDVPFEEFLHYSLIQRTREEQEAGALKDGLSNPFGKYANTKLPIAAVTGVETPEAEMTPDELERSNARRALRQAGWAAVFFLITTDILGPFNAPVAISQLGYVPGVLLYVFFGIFALYCGLLLWRLFIHLDSDQYPVKTYADIAERIFGRSARHVCTVLQSLQLIVNVGVICLSNGQSLAQIVAGQNNTGYICFSLAIVIWALFGMVIGQIRTLKNFSFLANFAVWLNLLIIFTSMGFVAHSPPNYAAALIQMGVPFGPVETHNFVPLPTTTKINGIMQMVFAYGGAMIFPEIMAEMRRPMDFWKGMAMAQTLIFIAYLMYGIFVYAFQGQFTLPLAYQGVSKYSWQTLGNVLALITGIIAAGLYGNIGIKVAYINIVEDWFKGPSLLSRKGHVIWAIMVVVYWGLAYIVGSAIPQVENISSLIAAICIMQFSYTFPPILRVGYDVITDAMAEDSVYVPGQGVSGRVDTWKDRSRWNRGLFTGRVWFKAFNFLLFIGFTIMAALGMWGSGVNIKAAFQIQGAATSFGCTAPV

SEQ ID NO: 471 - protein, 579 aa, Mortierella longigemmata
MAKQFPGKIELDNEIIMSEMKDVSSHDNTHHTSYTDISDVPFEEFLHYSLIQRTQEEHAAANLQKGDESESSSSPSSIRNPFGRWANTRLPLADVTSFDATTANMTADQLERANARRALRQAGWAAVFYLITTDILGPFNAPIAIAQLGYVPGIILYTVMGIAAFYCGILLWRLFIHLDSDQYPVKTYSDICERIFGRTARHVCTFLQSLQLIVNVGVICLSNGQSLAQIVAGNSGTGYICFSLAIVIWALFGMVIGQIRTLHNFSVLANFSVWVNLLIIFTSMGFIANSPPNYAAALSSMGVPMGPVVTHLFVPLPTTTQINGIMQMVFAYGGAMIFPEIMAEMRRPMDFWKGMACAQSLIFVAYLVYGVFVYSFQGQFTLPLAYQGVSRYSWQTVGNVLALISGIIAAGLYGNIGIKVAYVNIVEDWFHGPPLLSRKGHVIWAVMVVVYWALAYIVGSAVPQVENISSLIAAICIMQFSYTFPPALRLGYDVITDAMSEDAVYIPGHGTAGRIDTWKDSSRWRRGILTGRVWFKALNLVLAVGFLVMAGLGMWGSGISIQQAFEVSSATSFSCTAPV

SEQ ID NO: 472 - protein, 547 aa, Calocera viscosa
MASASPTNHVLEDHESKTPSKHTIQEEKNQYTHTVVNPAALFPTFLKLAAQQRERERVGISATEPEKGAIGDDSLLQGLDPHEQELLTARRALRTASWAAVFYLITTDILGPFNAAFAISQVGYVPGVILYFVMGAVACYTGLLLWYLFCRLDSDRFPVRTYGDLAQTIYGPWARHMCTVLQSIQLIINVGTICLSNGQSLSQIVIGGGGQLCFSVCIVLWAIVGMIIGQIRTLKNFGWLANAAVYLNLLIIFISMGFFAHSPPNYAAAVASYGPVIASGPVSTAAFVDQVLYNKVNGIMNMVFAYGGAMIFPEFMAEMRRPMDFWKGMCCAQALIFTCYMLYGVFVYAYQGQYTLAIAYQGVSTYAWQTVNNVIGLVSGIIAAGLYGNIAIKIAYINIVEQWFKGPPLISKNGHIIWAGMVLLYWSLAFIVGSAIPQVQTISGLVAAVCIMQFTYTFPPALVLGYQVLADGYGHNQEGVVLAGSFSLRRGFLAGNWKRKLFKLSNFLLFLASAALACLGMYGSGTAIAAVFQVSAATSFGCASPVA

SEQ ID NO: 473 - protein, 568 aa, Fomitopsis palustris
MYNNANLEGDPRLELEENGRDFLEPARDAHGTYLPTLNQPCQPARTVITRALAGVRPSFEEYLAAAERQRAYEEARHKGELSSTADTASADGSSHNEKPTKGASPVVSEAALTAEEKERINARRALRSASWAAVFYLITTDILGPFNAPYAISQVGYAPGVILYFVMGVMACYTGLLLWWLFLKLDSDSFPVKTYSDLMERIFGRASRHVAAVLQSLQLIINVGTICLSNGQSLSQITKGHLCFAVCIVIWALVGMVIGQIRTLKSYGWLANSAVWINLAIIFISMGFVSHSPPNYEGAKAAYGVLPGPVQTAAFVSQTLPNKVNGIMNMVFAYGGAMIFPEMLAEMRRPWDFWKGMCCAQLLIFVAYLLYGLFVYSYQGQFTLSIAYQGVSKYGWQTVGNVMGLITGIIAAGLYGNIGIKVAYYAIIEDMFNGPPLTSHKGRFIWSGMVLLYWALAFIVGAAIPQVQTISGLVAAVCIMQFTYTFPPALIFGFYFLKDGRDPVSGALSWRAGFFGGSAPRVLFKVFNFFLALAALSMAALGMYGSGTAIKLTFQTSQATSFGCSAPV

SEQ ID NO: 474 - protein, 540 aa, Antrodia heteromorpha
MYNNAGVEGDPRLEKEENGRDFLEPQAASYRHATFEEYLAAAERQRAYEDAHHKGEHTPDSASTNGSTQNEKTGKGAVASEAALTAAEKERINARRALRSASWAAVFYLITTDILGPFNAPFAISQVGYVPGVILYFFMGAIACYTGLLLWWLFLKLDSDVYPVKSYSDLMERVFGRATRHMSSILQSIQLIINVGTICLSNGQSLSQITKGKLCFAVCIVIWTFVGMIIGQIRTLKNYGWLANSAVWINLLIIFISMGFIAHSPPNFAAALASFGIPQGPVQTATFVSQTLPNKINGIMNMVFAYGGAMIFPEMLAEMRRPWDFWKGMVCAQALIFVAYLMYGLFVYSFQGQYTLSIAYQGVSKYGWQTVGNVMGLITGIIAAGLYGNIGIKIAYYAIVEDMFGGPSLLSKRGQFIWTGMTLLYWSLAFIIGAAIPQVQTISGLVAAVCIMQFTYTFPPALIFGYYFLADGRDPATGTLSWSRGFFAGSLGRKAFKLFNFVLAWAALSMACLGMYGSGTAIALTFKSSQATSFGCAPPV

SEQ ID NO: 475 - protein, 538 aa, Postia placenta
MFNDASMGGDPRLEREENGHDFLEPVHDHHGKVSFEEYLAAARRQRAFEEAQHRGESPASDTASSSTNEKSSKGAEVSEAALTADEKERINARRALRSASWAAVFYLITTDILGPFNAPYAISQVGYVPGVILYFIMGVVACYTGLLLWWLFLKLDSDTFPVKTYADLTERIYGRTARHIVSILQSLQLIINVGTICLSNGQSLSQIAKGNLCFAVCIVIWAIVGMFIGQIRTLKAYGWLANSAVWINLAIIFISMGFIAHSPPNYSAAESAYGIGIEPIVKSTFVSLPIASKVNGIMNMVFAYGGAMIFPEMLAEMRRPWDFWKGMCCAQLLIFVAYLLYGLFVYSYQGQYTLGIAYQGVSKYSWQTVGNVLGLVTGIIAAGLYGNIGIKIAYYNIVEDMLGGPSLMSRTGHIIWVGMVFLYWALAFIVGAAIPQVQTISGLVAAICIMQFTYTFPPALIFGYYFLKHGRDSSTGKINWKRGFFGGETKMLLFKTFNFFLAWAALAMACLGMYGSGTAIQETFQTGAATSFGCTPPV

SEQ ID NO: 476 - protein, 548 aa, Sparassis crispa
MATSIGNLEGDPRIVDKQEDGHDFLEPTHPRMGSLLPRFRHRLTPTLDAKVTLEEYCAHAVRQRKFEMEGPSTLSPSSSNIGEKNEKFPDISVEANLTEDEKERINARRALRTASATVFYLITTDILGPFNAPFAISQVGYVPGVILYFFMGAIACYTGLLLWWLFLKLDSDIFPVKTYSDIAERIFGKAAKHICTILQTIQLIINVGTICLSNGQSLSQMSKGRLCFAVCIVIWAIVGMLIGQIRTLKNFGWLANCAVWLNLLIIFTSMGFVAHSPPNYAAALASLGVPEGPIVHATFVSAPLYNKVNGIMQMVFAYGGAMIFPEMLAEMRRPWDFWKGMCCAQLLIFAAYLMYGVFVYAYQGQFTLPLAYQGVSKYSWQTLNNTFGLITGIIAAGLYGNIGIKVAYYNIVEGMLHGPQLMSRTGRFIWTGMVLLYWALAFIVGAAIPQVATISALVAAVCIMQFTYSFPPALICGFYFLKDARGETGRMWWYRGLFSGYWWFKWFNLILSLASFSMAGLGMYGSGLAIKATFKLGAATSFGCTPPV

SEQ ID NO: 477 - protein, 551 aa, Solicoccozyma terricola
MASFANIAGEADPRVPLPDSKIQQKSNDDLTIVEPAYPGASLIGRQARLHDMMCYAQQQRQIENGSPGDAGYPIPAMVEKHITRQPLPPPENAVDVLELTPDQAERANARRALKQASWAAIFFLITTDILGPFNAPYAISQVGYAPGVILYFFMGLIAFYTGCILAYLYCKLDSDKYPVLTYSDIGERVCGSAMRHICTVLQSVQLVVNVGTLILSNAQSLSQISMGKLCFVVGLVIWMAVGMFVGQIRSLKNYSWIANFAVWFNLLIIFTSMGFVANSPPNYAAAQAAYGDAIGSGPVMTAAFVSQPLAPKVNGIMNMVFAYGGAMIFPELMSEMRRPMDFWKGMACAQLLIFVAYLLYGLFIYSFQGQYTLPLAYQGVSKYSWQTVGNVLAMITGLIAAGLYGNIGIKVAYHNIVEGWFNGPPIMSKKGRYVWSVMVIVYWALAFVIGAAIPQIQTISGLIAAVCIMQFSYTFPPLFLFMFLVRRDTLLAGGSWKVGLWGRGWFLKWFNFTLFLGALSMAALGMYGSGISIRTTFMTAQATSFGCVPPV

SEQ ID NO: 478 - protein, 614 aa, Erythrobasidium yunnanense
MAVNAANLAGSEPIDPIGAERGQYAENHPRQFTAAQRLKPTFSEYRYWADLKRQSERDGTSGNGVDAEGNEYERPNIFKLIKNGGRIAPRPTAADGHRKSPTLFLPDDAHQAIDGEKDKKREPNIDITVTTLRRGQEYDGLTEDEAERLTAQRALRIAGWTTITYLITTDILGPFNAPYAIANMGMVPGVCCYFFFGVIASISAYFIGFLYNRLDSDRYPIRTYGDICERLVGKPLRYFATILQSIQLIVNVGIICLSNGQSLYQVAKGNLCFSVCVLIMALAGMLIGQIRSLRNFGVIGQMSVFLNFLIIFVSLGVVCNTGPNYAVANAADSTLGDGPVVVKAFNSGSIEAQINGMFNIVFAYGGAMIFPEMISEMRRPMDFWKGMFLADTIITIAYMVYGIVWYTQQGQYTQAQSYFGLVPYWSQTFCNILAIITGLIAACLYGNIGVKVIYINVFQDLLGFPPLNTRKGRICWTAFIPCYWAIAFVIGSSVPALGAMTGLVGAVCIFQFTYTFPPLLMLCYHLKTDAGKEDEHFSGYGTKWTPSESWKSMARWTRAWFGGGMLSFGWKIVMLCYFLACLATVAMGMYGTGESVKSAFEVGQATSFGCKANA

SEQ ID NO: 479 - protein, 584 aa, Piloderma croceum
MAFVSPANIAGRDPLEPMADSNEKMDFIEPSHGFASDGHKPTIAEYMYYAKIKRDAERGGFSGNGADAQGTNIARPSLWQMLRHGGGRHMTTEHLDKGLITAMKDAHAEETVGLSEIEVEKLNARRMLRVAGWSTVFYLLTTDILGPFNAPYAISLLGLVPGVLLYFFFGIIAATTGLILSYLYNMLDSDRYPVRTYGDLAERVGGTLLRHACSILQSIQLVVNVGIICLSSGQSLYQVSKGKLCFSVCVVVWALAGMIVGQIRSLRNFGIIGGFSVYLNLLIIFISMGVVAHSLPNYAVANAADDTLGNGPVIVNAFNNQNLVGQVNGMFNMVFAYGGAMIFPEMMAEMRRPMDFYKGMACAQILIFVVYLMYGIFWYCFQGQYSQPNSFQGLSPFAWQTTCNVLNMVSGMIAATLYGNIGIKVIYINIVEDMFKGPSLVSRKGRILWTFLVPVYWALAFVVGSAVPALGAMTGLIGAVCIFQFTYTLPPLFWFLFELKKDAALEDEKFTGHGSNPRAVDTWRDGSRWRRGIFTGRWYVKIFMFVIFLAALACAGLGLWGTGEAVKATFLHGQATSFGCLANA

SEQ ID NO: 480 - protein, 574 aa, Rhizopogon vinicolor
MAFQPAAIEAGHDPRVHHPEKEEQAAYTYEDNVLPDGSTPNIETYMYYAKIQRDKEAALSAKEDAERGRGSLISRAFKRSREFDGDSITSAHSGEKTVAASEEDGSSAVVTEYEYRAASSALRTATWGSVFYLITTDILGPYSTPYAFQQVGYGPGVACFFVLGIMAAYSSFILWWLFLKLDSEKFPVRSFGELGQRIYGRWFRHVCNILQSVQLVFNVGLIILGNGQGLSQMAKFRLCFSVCNVVWTLAGMILGQIRTLQKFGSIANLAIWLNILTLIMTMASVANSPPNYTASTLTSPYPPVQTYAIYIQPFQNQLTGIMQIVFSYGGAMIFVEFMAEMRRPMDFWKAMAYSQLFIFIVYMFFGLFVYSYQGQYAINPANQGISAYGLQTATNAISLTAGLIAAALYGNIGVKIIYNNILVELLGFPELTTTRGKYYFSASVIVYWSIAFVIGSAIPQFSYISSLVAAVCIFQFTYTFPPFMILGYLMQVDANKGDGEFDIKNPNAHRVDTWHQLSRWKRGWFFFNVWNILLTLACLSCAILSSYSSIKAIVGAFQSGATSSFGCKSPLDNS

SEQ ID NO: 481 - protein, 584 aa, Suillus brevipes
MAFQPAVVEASRDPRVYLSEKEEQDAYVPENYHIPDGTVPNLETYMYYAKIQRDREALSAKNDAEGGHWGSLISRVFNRSQESDERSVASAHSDEKNVAPSSEDGSGALVTAGEYRAASGALRTATWGTVFYLITTDILGPFSTPWAFQQVGYGPGVACFFVFGIMAAYSGFLLWWMFLKLDSERYPIKSFGDLGQRIYGNWFRHVCHILQSLQLVFNVGLIILTNGQGLSQMSKFKLCFSVCNVVWALAGMILGQIRTLQKFGSIAHLSIWLNVAILIMTMAFVANSLPNYNASLLPVGPVITQAINLQPFQDQLNGIMQIVFSYGGAMIFVEFMAEMRRPMDFWKAMAYSQIFIFVVYMLFGAFVYTYQGQYVVNPANQGISAYGLQTATNAISLASGLIAATLYGNIGIKVIYNNILVEIFDAPPLTVTRGKYYFAICVPVYWSIAYIIGSAIPQVSSLSALVAALCIFQFSYTFPPFMVLGYCMQLDAIKGDREFDINNPDAHRVDTWRDLSRWKRLCTYYLSFANWKNVLFNVWNFVVVLACLSCAILSSYSAILAIVKAFQSSTSSSFSCHSPLDNSG

SEQ ID NO: 482 - protein, 571 aa, Boletus edulis
MSLSLATVEDHNPRVHIQENNDVVAPEHFLLDDGLAPNFETYLFYAQEQRDKEAAEARKEGHLPPTGWLSELFGLNRFTDTASVVSDEKKAVSDEAATLGVSPAEYRAASSALRTATWGAIFYLITTDILGPYSAPYAFAQVGYGPGVACFVVFGVMAAYSGVLLWHMYLKLDSDRFPLKSFGDLGHRIFGNWFRIVCHVLQSLQLIFNVGLIILGNGQGLSQVVKFRLCFSVCNIVWMIGGMMLGQIRTLQKFGWVANFSIWLNIITLVVTMGAVAHTAPNYTAAKAAYGVVAGPVQTLAINQQPFQPQLNGIMQIVFSYGGAMIFIEFMAEMRRPMDFWKAMACAQVFITVVYMFFGLFVYTYQGQFVINPANQGISLYSLQTATNVISLVAGLIAAALYGNIGVKVIYQNVLMELFHAPPLTVKSGKYLFAVSVIVYWALAFVVGSAVPQFSNLSALVAAVCIFQFSYTFPPFMILGYLVQVDAMSEDRPYDVNDPRTSRIDSWRNVSRWIRGYKKHFIFNTWNLIIFLACLATAVLASYSAITSIITDFQTGTSGTSFSCRSPLQPA

SEQ ID NO: 483 - protein, 569 aa, Phlebopus portentosus
MAFQPAAVEGGHDPRVHPSEDGAYVPDHPVLSDGTSPNLETYLHFAAQQRAREEALAGTEVESARWTSFFFGDKGAEKASVVSAAASDEKKEKSEEGALSVSDAEYRAAASALRTASWGSVFYLITTDILGPYSAPFAFAQVGYGPGVACFVVFGVMAAYSGVLLWHMFMKLDSVEYPLKSFGDLGQRIYGPWFRHLCNILQSLQLIFNVGIIILGNGQGLSQMAQFKLCFSVCNIVWTLAGMILGQVRTLRRFGWIANSAIWLNIITLIITMAAVRYTAPNYTAAEAAYNVPAGPVQTLAINTQPFEPQLNGIMQIVFSYGGSMIFIEFLAEMRRPMDFLKAMACAQAFICFVYMFFGLFVYSYQGQFVINPANQGISLYSLQTATNAISLVAALIAAALYGNIGVKVVYNTILVELFGAPPMTVKKGKYIFAVSVVLYWAIAFVIGSAIPQFSNISSLIAAVCIFQFTYTFPPFMYLGYMMQIDALSADRPYDIRNPHGSRVDSWKDLSRWTRAVKKHFVFNLWNFVITLACLSCAILASYAAVKSIVLDFQTGTSGTSFGCRSPLQ

SEQ ID NO: 484 - protein, 558 aa, Pisolithus tinctorius
MAFKPAAIQGHDPRVPIPEKDLHPDHPILADGTEPNFETYLYYAKQQREKEAAESKSDDMERGFWANILWGKGDQKLMPTNFTDDKKGNTTGSASEAEYRAASSALRTASWASVFYLITTDILGPYTTPWAFSQVGYGPGVACFIAFAIMAAYSGLLLWYMFMKLDSDKHPLRSFGDLAYRIYGGWFRHVCNVLQSLQLILNVGLIILSNGQGLSQMAKFKLCFSVCNVVWMLGGMMLGQIRTLRKFGWVADFAVWLNIITLIITMGAVAHTPPNYEGSGLPPGPVQTLAINNQPFEEQLNGIMQMVFSYGGAMIFIEFMAEMRRPMDFWKAMAFAQLFITTVYMFFGLFVYSYQGQFVVNIANQGISLYSLQTATNATSLTAGLIAAALYGNIGVKVIYNTIFVELFRAPPLTVKSGKYLFAVSVIVYWALAYIIGSAIPQFTNISALVAAVCIFQFSYTFPPFMFLGFVVQNTALSGDKPYDVNNPRSSRVDTWRNWSRWRRALSKHVLFNLWNFILVLACVATAVLAAYSAIKSIVNAFHTSGAPTSFGCKSPVQ

SEQ ID NO: 485 - protein, 587 aa, Serpula lacrymans
MAFVQPAAIDGGLDPRVHLSEKEQVAIIGPPLEDASPDGTVPNFETYLYYAQIQREQERNDSRPAHEVEERHWAGLFSRAIKPPPSDKASIASATDEKREPSEENAVYISKQEKRNASGALRTATWSSVFYLITTDILGPYSAPWAFAQVGYGPGVACFFVFGVMAAYGGFLLWWMFLHLDSERYPLRTFGDLAHRIFGKYARLVCNILQSLQLIFNVGLIILGNGQGLSQMAKFKLCFVVCNVVWTLAGMIFGQIRTLQKFGWIANLSIWMNIIVLIMTMGAVPHMAPNYTATVANYVAGAVEPPVQTLAIFQQAFQTQLTGIMQIVFSYGGAMIFIEFMAEMRRPWDFWKAMTVGQGFIFVVYMFFGLFVYSYQGQYTVNPANQGISAYGLQTATNAVSLTAGLIAAALYGNIGVKVIYNNIGVALFKAPPLTVPRGKMIFAISVVVYWSIAFVIGSAVPQFSNISALIAAVCIFQFSYTFPPLLMLGFTMQYDAVKGDEQFDPNNPDAACRVDSWRQLSRWRRALSSPTSLRFWFKMWNFLLTLACFACAGLSSYSAIEAIQLGFQTGSASTSFSCQSPVDKSG

SEQ ID NO: 486 - protein, 572 aa, Coniophora arida
MAYVAPAAIDQAYDPRSHLTEHEQDDAIAPHPDHFPDGTPINLETYMYWAKLRREEEKADTDVGPRNPWLDFFSTKKSTPPIEDSHSDSPSDEKREKGSDTASAVISPREYRNASGALRTASWGSVFYLITTDILGPYSTPYAFSAVGYGPGVATFLGFGLMAAYSGACLWWMFMKVDSTKYPARTFGDLGYRLLGNGFRHLCSILQSLQLIFNVGIIILGNGQGLSQMAKFQLCFSVCNLVWMLGGMILGQVRTLTKFGWLASLSIWMNILVLIMTMASVAHSPPNYAATLVPQGPVVTMAINRQPFEAQLNGIMQIVFSYGGAMIFTEFMSEMRRPMDFWKAMAYAQVFITFVYMFFGIFVYSYQGQFTANPANQGISAYGLQTATNAISLTAGLIAAALYGNIGVKIIYQNILINLFKFPPHHSPKGKWIFAVSVLVYWSLAFVIGSAIPQFTNISSLIAAACIFQFTYTFPALMILAFAMQVDAIEGDREYDPANPHASRVDSWRDFSRWKRALKKNFVFKLFNFLVFLACLAAVGLAMYSSITAIQAGFAADGSATSFGCHSPVDNS

SEQ ID NO: 487 - protein, 585 aa, Fibularhizoctonia sp
MALVNNASRAPSGRDPRSTDLTEKQEEQALPPVDTTLPNGAQPPFEAFLHYARIQRAAELADTRAGSVAEEQHWGGLIRRAFGGRKKIQAVPSDASSSCEGVEGEKGEKTYLEAEASSVNSGDVAYKTLRVASWQSVFYLITTDVLGPYSAPYSFAQVGYWPGCIMFFVFGCLAAFTGYLLMYMYGALDSPQYPVRHFGDLADRIFGRWAKHVCNILQSLQLIFNVGIIVLANGQGLSQITQFRVCFSVCIVIWTLAGMFIGQVRTLQKFGWLANVSVFMNIFVILVTMGVVSHQLPNYAASVHPIGPVITQARVVQPFEFQVTGILQLVFSYGGAMIFIDFMAEMRRPMDFWKGMACAQVLITLVYMIFGIVVYSYQGQFVVNPANQGISGYAWQTATNVISLTAGLTAAALWGNIGVKVIYETVLMTFFRFPPLHTQRGRVAWTFSTIVYWAIAFVIGTSIPQFSNISSLVSAICTVQFTYSFPPLLALGYQVQADAAKGDRVWDPSQPTPFAHRVDSWRDWSRWQRGLWPMLWLKVWYAVMCLASLATAGLGAYSAVAAIIAGFKTGSHASSFGCKSPVDVR

SEQ ID NO: 488 - protein, 564 aa, Umbelopsis versiformis
MANIAPGELSLGGDPRVKGDEQEVTENDTSDQTFVAKPNFAVYLYLAAIQRRREGVKITNTFSSNISEKNEGTFEKDAEDASIKDGYHPVTGWNIAADKAEAHRALRVASWMSVFYLITTDILGPTSCPWAFAQLGYVPGVLLYLFMGLAAAYTGWQIWIMYLALDSVQFPLRTYSDLAGRIFGKTAEHIVNVLQSIQLLFNVAVIILGNGQGLSQVAANANVCFSVLVLVWALAGMLVGQIRSLKNFGWLANSAIWMNLIVIFITMGVVAHSAPNYLAAGLQNGQTGTAIITGAFIDTPFNDKIVGVMQIVYSYGGAMMFVNFLAEMRRPWDFWKGMLFAQLVIFVCYVMFGLFVYTYQGQYTINPANQGISIYGWQTATNVLSLVSALIAAGLYGNVGIKIVYQTIILDLLNGPAMASFAGRIMWTILVIAYWAFAFVLASAIPQFSNISGLVAAVCILQFTYTFPPLFMLGYEIQRDAVASEEFIDEQTGMPGTPSDTWRSLSRWKRGLTKRWYVKLFNFLMFWAALATACLGMYSSGTGIQQGFAAGGATTSFTCQSPVA

SEQ ID NO: 489 - protein, 581 aa, Basidiobolus meristosporus
MAYTAPVALALEGSDPRLHHESLHHRPHHDDHEEKSAKNSLTPVERGLGMSPYNTKDEVPLEAYLHWATVKRDNDRWRDRNKTKDESSSHQKADQDMETDPDPAASAPQILGWDLDADRLQAQRALRSASWQAVFYLITTDILGPSSAPWAFSQLGYAPGVLLFFFMGLAAAYTGWQLWAMFMKLDSEQYPVRTYSELSFRVFGKWAQHTVNILQTIQLLFNVSVIILGNGQGLAQISQYRVCFSVLTLIWAFAGMFIGQIRSLKNFGWLANFAVWLNLLVIVLTMGVIAHTLPNFAVAHQQNGVTGTKVITQAFIHGSLNSQIVGIMQIVYSYGGAMMFIEFMSEMRRPMDFWKGMACAQVLIFSCYMFFGVFVYHYQGQYTINPGNQGISSYAWQTATNILSLVSALIAAGLYGNIGIKVIYQNVVLDLMKGPEMSSRAGRVLWTIMVVAYWVVAYVIASSIPQFSNVSGLVAAVCILQFTYTFPPILMLGFQIQVDATKGDKPFDVTTGATHRVDTWRDLSRWRRGLSPQWYIKLFNFLFFLAALVTAGLGIYSSVQGIIQGFSRRGAATPFGCQAPV

SEQ ID NO: 490 - protein, 573 aa, Sphaerobolus stellatus
MATQLGGLALEGTDPRLQEPVAAHAHKGRIPFEELLYYAKLQRQKEVDADKAYAITNPEKPSLIGGLFKRKDNNSSAPAITEKEDSVDEKREKMDTEKAPSMVSDEEKTAAYRAIRTASWLSIFYLITTDILGPTSAPWAFSQLGFASGTVLFFILGVIAFYTGMQLWYMYLKLDSDKYPVQNYSDLTERIYGRFARHAINILQTLQLLFNVAVIICENTQGLSQVSKGKVCFSVLAVIWMVAGMIIGQIRSLRNYGSLAHWAIWMNLIVIFITMGAVAHSAPNFAAALQENNVPMGSGVVITSAKISLPFTDQIVGVMQMVYSYGGAMLFIELMAEMRKPFDFWKGMVCAQLLIVTAYLLFGVYVYAFQGQYTINPANQGISGFGLQTATNVISLVSALIAAGLYGNIGLKVIYVNIVQDLFGGPPLVSKAGRYIWIGIVLAYWAIAFIVASAIPQFSNISALVAALCILQFTYTFPPILYVGFAVQRDAIDGQEEYRPGMSVQQLRKDTWHDFSRWRRGFGKRWWLNICNILLFLAALATAGLGAFSSIEGIIKGFQTSGAATSFGCRAPV

SEQ ID NO: 491 - protein, 578 aa, Scytalidium sp
MALQQPGTLALDGGDPRLSMGEGQVEVPEQVRHILHDPNVTLEEYIYYAKIQREQEKQGLGPEEREALYQQSLLARNTNVSDSAGSGLDEKKAIDEKHVAPTSAVTGPFRGVAAAEWETASRAARNAKWGAIVYLITTDILGPSNAPYAISQFGYVGGVLVYTCMGIMAFIAGWQIWRMFLKLDSDRYPMRTFGDMGFRIYGAWTRHGMNLLQSIQLLFNVGVIIIGNGQALSQMSKFKLCFSVCCLIWPLVAMITGQIRTLQKFGYLANFAIWINLLVIIFTMAVACNTGPNFTVQPSNPPGPVQHTVWIPSGSDFDSQLGAAMQIVYAYGGAMLYCEFMAEMKRPLDFIKAQFVAEIFIYVCYLIFGLVVYSQQGQFTYNPANQGINPYAWQTTTNALNLVSGIIAAVLYGNIGIKVIYQNIIQDLLGGPELTTKRGKILWVGMVPLYYSIAFLVASAVPQFTNISSLVAAVCIMQFTYTFPTILYFGMKVQEHAFHPDEKFDPVTGTVNRVDTWKEWSRWKRGLFSRSFPMKLFCFLFFLASCATAVLGMYASLKGIIDDFKTGHSTSFGCSYPG

SEQ ID NO: 492 - protein, 573 aa, Amorphotheca resinae
MSTNPAALALDGGDPRMSTGDAQMIAPLAARRILHDPNVMLEEYLYYAKIQREQEAQGLGPEEREAFYQSLAAGNSRNSPDESDEKKEVNEKAPVPTTTYSGPAPAEWETASRAARNAKWSAVVYLITTDILGPSNAPWAISQFGYVGGVITYTFMGLMAFFAGWQIWRMFLKLDSDRYPMRTFGDLGFRIYGTWTRHGMNMLQSLQLLFNVGVIIIGNGQALSQISKYRLCYAICILIFPIAGMIAGQIRTLQKFGHLANFAIWLNVLVIIFTMAVACHSLPNYAASLGVYGTPQGPVEHTVWIPSGSTFDSQLQAAMQIVYAYGGAMLYCEFMAEMKRPMDFIKAQFIAEMFIYLCYLIFGLVLYSQQGQFTFNPANQGLSPYSWQTATNAINIVSGLIAAVLYGNIGIKVVYQNIVQDILGGPELHSKRGKIIWVAMVPLYWFTAYILASAVPNFNGISSMVSAVCIMQFTYTFPTILYFGLQLQTHAITPEETFDPATGVVHRIDSWKDFSRWKRGFKRMWWMKVFCLAFFFASCATAVLGMYASVKSIKAAFDSGHATAFSCHSPLDG

SEQ ID NO: 493 - protein, 590 aa, Botrytis paeoniae
MANNLGNLALDGGDPRIDGVGEVNVPTTVRRNLHDPNVPFEEYLYYAKIQREQEKNGLGPEERERMYQEYLAGVDHVAGKEIGNEKHALPEIEDEKAEPQPVNESKPSSITKAHHPSLVGAGEWETASRAARNATWGAVVYLITTDILGPSNAPYAVSQFGYVGGVMMYFFMGIMAFFAGWQIWRMFLKLDSDRYPMRTFGDLGFRIFGTYSRHGINLLQSIQLLFNVGVIVISNGQALSEMSKYKLCFSICILVWALAGMILGQIRSLQKFGYLANFAIWLNILVIFMTMGVAAHSPPNYDAVLASFGIPKAPIKHTVWIPSGSTFDSQLSSAMQIVYAYGGAMLYCEFMAEMKRPLDFIKAQFLAEIFIFVCYLIFGLVVYSQQGQFTYNPANQGLSPYSWQTVTNAINLVSGLIAAVLYGNIGIKVIYQNIVEDLFGGPELTTKKGKLIWIAIVPLYWAFAFVLGSAVPQFTNISSLVAAVCIMQFTYTFPTLLYFGMTIKEDAMHPDEKFDPATGTINRIDTWKDMSRWKRGLIPRWWLKVFCFLFFLASAATAILGMYTSIKSIIANFALGHATSFGCTSPVGYA

SEQ ID NO: 494 - protein, 590 aa, Monilinia fructicola
MANNLGNLALDGGDPRIDGVGEVEIATTVRHSMHNPNVPFEEYLYFAKIQREQEKNGLGPDERERMYQEYLAGVDNVARKEIEDEKKALPDIGDEKAEPQPVDESKPSSITKAHNVPYVGAGEWETASRAARNATWGAVVYLITTDILGPSNAPYSVSQFGYVGGVMMYFFMGIMAFFAGWQIWRMFLKLDSDKWPMRTYGDLGFRIFGTHARHAINLLQSIQLLFNVGVIVISNGQGLSQMSQYKLCFSICILVWVLAGMILGQIRSLQKFGYLANFAIWLNVLVILMTMGVAAHSAPNYDAVFQSFGIAKAPITHTVWIPSGSTFDSQLSSAMQIVYAYGGAMLYCEFMAEMKRPLDFIKAQFVAEIFIFICYLIFGLVVYSQQGQFTYNPANQGLSPYAWQTVTNALSLVSGLIAAVLYGNIGIKVIYQNIVEDLFGGPELTTKKGKIVWIAIVPLYWAFAFVLGSAVPQFTNISSLVAAVCIMQFTYTFPTLLYFGMIIKEDAMHPDETYDPATGKVHRIDTWKDISRWKRGLAPRWWLKIFCFLFFLASAATAVLGMYTSIKGIISGFALGHATSFGCTSPVGYA

SEQ ID NO: 495 - protein, 589 aa, Rutstroemia sp
MANNMGNLALDGGDPRMAPVGEVAVPTPVRRKMHDPNVQFEEYLYYARIQREQERQGLGPGERERMYREAITGVDATSAKESGDEEKKAIAESGDEKTSEPVNEKTTTASVVHSASHVSAGEWESASRAARNATWGAVVYLITTDILGPSNAPWAVSQFGYVGGVMMYFFMGIMAFFAGWQIWRMFLKLDSDRYPMRTFGDLGFRIFGTYARHGINVLQSIQLLFNVGVIVIGNGQSLSQMSKYKLCFSICILVWALAGMIVGQIRTLQKFGHLANFAIWLNVLVILFTMGVAAHSAPNYEAVFQSYGISKGPVHHTVWIPSGTTFYTQLGAAMQIVYAYGGAMLYCEFMAEMKRPLDFIKAQFVAEIFIFVCYLIFGLVVYSQQGQFTYNPANQGLSPYSWQTVTNALSLLSGLLAAVLYGNIGIKVIYQNIVEDLFGGPELTTKKGKLIWVGMVPLYWTVAFVLGSAIPQFTNISSLVAAVCIMQFTYTFPTLLYFGMTIKEDAIHPDETFDPATGAVHRIDSWKDLSRWKRGMKNLWYVKVFCFLFFLAALATAILGMYTSIKDIIADFALGHATSFGCTSPVGYA

SEQ ID NO: 496 - protein, 600 aa, Pichia membranifaciens
MSELKSVSSPAAILSGVISNNANALDNFEIKADEVDEFFDVPLEEFLYHAKLQRELEKSPDYGEAAPTVPLWNVIKTRLLNKPSGKIVTAAGASDSHSATSFRSSAEEVSEKDEKLQIVNQQSYDLINEPIYTSKENANRMLRVASWGSVFYLITTDILGPTSAPYAIAQLGYVPGALLYFLFGITAAYCGALLWHQFLHLDSIKYPLRNYGDIVGRIYGQYTRYFIDFFQSVQLFCNVAVIILGNGQGLSQIAKGKGCYTILIFVWAIAGAIVGQIRSLAKFGFLANAAIWMNVFVIVATMACVSVSLPNYVAAAGTGHIVEGPVITHVVISGAGDQFQSQLNACMNIVYSYGGALVFIEFMAEMKRPWDFWKGMACAQLFIFTVYLIFAMVVYHYQGQFVINPANQGISTYSWQTTTNVVNLVSALIAAGLYGNVGIKCFYTSVFQRFFNWPALASKFGRIIWTVFVCVYWAIAFVFAAAIPNFSSLVSLIGAVCILQFSYTFPFIMQFGFDIQVGALTGDGEYDPVNKITHRVDSWKDWSRWARGYKQKWFANTCHLILFFASAATAALGIYSSSMSLKKAFADGTTTSFTCKSPIA

SEQ ID NO: 497 - protein, 604 aa, Pichia manshurica
MSELKPVSSPSIILSNVISNNANALDNFEIQDEEVQEFFDVPLEEFLYHAKLQRELEKSPDYGEAAPTVPLWEVIKTKLLNKPPSQKTPQSLSDTHSNNSFKSSIEEVSEKNEKDNEKLQVVNQESYDLINEPLYTSKENANRMLRVASWGSVFYLITTDILGPTSAPYAISQLGYVPGALLYFLFGIAAAYCGCLLWDLFLQLDSIKYPLRNYGDIVGRIYGRYTRYAIDFFQSIQLFCNVAVIILGNGQGLSQIAKGKGCYTILIFVWAVAGAIVGQIRTLAKFGFLANAAIWMNVFVIIATMACVSAFGPNFTAAAGTTGAVEGAVMTKVVVSGAGSEQFQNQLNACMNIVYSYGGALVFIEFMAEMKRPWDFWKGMACAQLFIFSIYLIFSMVVYHYQGQFVVNPANQGISNYGWQTTTNVINLVSALIAAGLYGNVGIKCLYSSVFQRFFKWPALSTKIGRIIWTFFVCVYWAIAFVFAAAIPNFSSLVSLIGAVCILQFSYTFPFIMQLGFDIQLGALTGDGEYDPVNKITHRVDTWRNWSRWARGYKQKWFSNTCHLILFFASAATAALGIYASSMSLKEAFESGSTTSFTCKSPVA

SEQ ID NO: 498 - protein, 600 aa, Candida ethanolica
MSDLHPIPSPSSILSNVISNNANALNNFQIDTSEELDEFFDIPLEEFLYQAKLQRELEKTPEYGKPAPTVPLLEIIKTKLFNKSTDNNENKIIEKNSSNNSDMSTFDSNISDDEKKLKIIDNNDLINEPLYNSKENANRMLRVASWGSVFYLITTDILGPTSAPYAISELGYVPGALLYFLFGITAAYCGVLLWSQFLKLDSIKYPLRNYGDIVGRIYGKYTRYAIDFFQSIQLFCNVAVIILGNGQGLSQIAKGKGCYTILIFVWGVAGAIVGQIRSLAKFGFLANSAIWMNVFVIIATMACASAFLPNYTAALGTNNIPEGPVITKIVISGSGSTAFQSQLNACMNIVYSYGGALVFIEFMAEMKRPWDFWKGMACAQLFIFTIYLLFAMVVYHYQGQFVINPANQGISNYGWQTTTNVINLVSALIAAGLYGNVGIKCLYSSVFQRFFSWPALNSKFGRWIWTVFVCIYWAIAFIFAAAIPNFSSLVSLIGAVCILQFSYTFPFILQLGFDIQLGALEGDGDYDPVNKITNRIDSWKNWSRWVRGYKKNWFKNTCHLILFLASAATAALGIYASAMSLKEAFESGATTSFTCKSPVA

SEQ ID NO: 499 - protein, 593 aa, Pichia kluyveri
MSELKPVQSPGSVISNIISNNANALDNFALENDDFDEFLDVPLEEFLHHAKLQRELEKSPDYGEAAPTIPLWEVIRTKLLNKEPKNYAGNTEALTIQNSSNVASLDKIDEKVQTTDDLISEPLYTSKENANRMLRIASWGSVFYLITTDILGPTSAPYAIAQLGYVPGALLYFLFGIAAAYCGVLLWNQFLLLDSIKYPLRNYGDVVGRIYGRGVRYSIDFFQSVQLFCNVAVIILGNGQGLSQIAKGKGCYTILIFVWAIAGAIVGQIKSLAKFGFLANAAIWMNVFVIIATMACVSKWGPNYVAALGTTGTTPGPVLTHVVISGGSNEQFQNQLNACMNIVYSYGGALVFVEFMSEMKRPWDFWKGMAAAQMFIFSIYLIFAMVVYKYQGQYVINPANQGISEYGWQTTTNVINLVSALIAAGLYGNVGIKCLYNSIFQRFFHWPSLNTKIGRWIWTVFVCVYWAIAFVFAAAIPNFSSLVSLIGAVCILQFSYTFPFILQFGLDIQLGALVGDEPYDYVNKITHRVDSWRNFSRWARGYKQKWFANTVHIILFLASLATAGLGIYSSSMSLKSAFQDGTTTSFTCKSPVA

SEQ ID NO: 500 - protein, 579 aa, Saccharomycopsis malanga
MPALDAIKSAASVAISENGKALQNFVPQEVERAGFDEFFDVPLEEFLYHAKLQRQVEKSPEYGEAAPTIPLWALVKKNLLGKGPKTEAIDTSETPSNEKEESHDLVSEPASASLENANRMLRTASWGSVFYLITTDILGPTSAPYAIAQLGYVPGSLLFFLFGICAAYTGVLIWNMFLKLDSVKYPLRNYGDIVGRIFGRKTRYAIDFFQAVQLFCNVAVIILGNGQGLSQVAKGKGCYTILIFVWSIAGMIVGQIRSLQKFGFLANSAIWMNVFVIIATMACVSGELPNYVAALGTNDVTKGPVVTNVVVSGSGGNFTPQLNACMNIVYSYGGALVFVEFMSEMKRPFDFWKGMACAQLFIFSIYLLFGLIVYHYQGQFVINPANQGISNYNWQTATNIVNLVSALIAAGLYGNVGIKVIYVSVFQRFLHFPSLVSKTGRIIWTVFVCIYWGVAFVFAAAIPNFSSLVSLVGAVCILQFTYTFPFIMQFGLDIQIDALSGDGEYDHVNKVTHRVDSWRNLSRWTRGYKKHYIRHTVHIILFLASLATAALGIYSSSMSLKHAFAKGRTTSFTCKSPVA

SEQ ID NO: 501 - protein, 580 aa, Schwanniomyces occidentalis
MSALQAIKSIGSEVLSEPGRIMENCGREGLEDDDYNIPLEEYLYHAKLQRELEASPDYGEAAATVPLFELIRVKLLKKEPRNASPVIADDDEAEKVPSEKELVHDLISEPLSTSKENANRMLRTASWGSVFYLITTDILGPTNAPYAISQLGYVPGSLLYFLFGICAAYTGYLIWNMYLKLDSTKYPLKTYGDIVGRLYGKTTRYLIDVLQSIQLFCNVAVLVLSNGQGLSEVTKNKGCYTILILVWALAGMVVGQIKSLQRFGFLANAAIWMNIFVIVATMACVAKWDPDYAAAYGVSHVLKGPVVTKVVISGSGGNFKNQLNACMNIVYAYGGALIFIELMAEMKRPWDFWKGMACAQSFIFTVYLVFGLIVYHYQGQFTINPANQGIGTYGWQSATNVVNFVSALIAAGLYGNVGIKVVYQTICERLFKFPPLEGRKGRVIWFVAVIIFWGLAFVFAAAVPNFSSIVSLVGAVCILQFTYTFPFILKFGLDFQMGALVGDGPYDHVNKVTHRIDSWKNPSRWIRAYKQKWLLNTGHLILFFASLATAALGIYSSAESLKDAFEDGTSTSFTCNSPVA

SEQ ID NO: 502 - protein, 577 aa, Zygoascus meyerae
MSNLEAVHSAMSDIIQENKQALKNLAHENLDEEVVKSWDELPLEEFLHHAVKQRALEGTEEYGPADSAMPQLALAKKILRKEKEVSGEENDNSAVAHDNGSSDVAFGTVEQANLALRNASWVAVFYLITTDILGPTSAPYAISQLGFVPGSLLFFLFGIVAAYTGYLIWKLFLKLDSATYPLRNYGDTAGRVFGGYARYLVDLLQAIQLLCNVAVIILGNGQGLAQIAAGPSGTKNVCFSVLVVIWSFAGMIVGQIKSLQKFGFLANTAIWMNLFICFATMGCVAHSKPNYSAALSQLGIPEGPVITKAVISGSGNFTTQLEACMNIVYSYGGAMVFVNFMAEMKRPWDFWKGMIMAQSFIFVVYLLYGLFVYAYQGQFVINPANQGVSGYAWQTVLNVINLVSALIAAGLYGNVGIKVVYTTFIQGWARGPALHSKKGRVVWFFMVIIYWAIAFVIASAIPQFSALTGVIGAVCILQFTYTFPPLIKLGFDIQVNAMTADGPYDPVTRTTNRVDTWKNWSRWRRGIFTNFWKNFGHLILFLASLCTAVLGCYSSIKEMVSAFSGGSSTSFRCTAPV

SEQ ID NO: 503 - protein, 618 aa, Meliniomyces variabilis
MASQNLANFALDGGDPRMGEKNPGQYALDHGHEGGLQTGFSIEAAQVHNDSSILFEEYLHYAQITRAEEREYEGNLIKRKDPWSLGGIIKNRFSKGHVHEVNAVVDGNQITTTHNNWSTVTDLEWRQASRATRTASWGSIFFLITTDILGPSGAPWAFSNTGYGPGAALYTVFGLMASISGWYVWGVYMHMDSDRYPLRDFGQAFFRVFGKEVRHLINVLQSLQMFMLVAVLILSLGGSVSQVSIGQNGAHGNGLCFIVCLLIIAILGMILGQIRTLQRFGWLANLSVWTTVITSLMAVGVACNSDPNYATMFGSFGGAGSAFGDLNFPNGTVESHIPIRTFAGTPPDGYASGGTGFLGTYQGINTIIYAYGGAMLFFNLLAEMRNPWDFWKGMLCADVFIYLVYMFFGLLQYSQQGQYTYNTAIQSINPYNYQTAGNILSIVGGLIAAALYGNIGIKVIYNNVFMELFHFPALTTKRGKLIWVAMVPIYWSLAFVMAGAVPELGDISSLVGAFCIGNFTYTFPALLKIGFEIKKGAMLPEESFDEATKKYVRVDSGFKRWIRGYRKTFLLTSFNIFYFLGALVVCGLGCYSAIEALIGAFSGGSVATSFSCTSPYAG

SEQ ID NO: 504 - protein, 619 aa, Cadophora malorum
MSNLANLALDGGDPRQGEKKNPNQYALDHGHEAGLANGFTIEAAQVHNDPNILFEEYLHYASITRAEERVYEKSTVKSDEPFSLGGLIKSRFSKGHKHEINAVVEGNQITTTHNDWSTVTDLEWRQASRATRTASWGSIFFLITTDILGPSGAPWAFSNTGYGPGVALYTTFGLMASISGWYVWGVYMHTDSDRHPLRDFGQAFFRVFGPAMRHLINVLQSLQMIMLVAVLILSEGGKASQISIGRNGENGNGLCFVICLLIIALLGMVLGQIRTLQRFGWLANFSVLTTVLTSFLAIGIAATSEPNYATMFSSFGATTAVPFGEVNFPNGTVESHIPIRTFAGTPDYGYASGGVGFLGSFQGINNIIYAYGGAMLFFNLLAEMRNPWDFWKGMIVADVFIYLVYMFFGIFQYSYQGQYTFSSAIQSITPFNYRTAGNVLAIMGGLIAAALYGNIGIKVIYNNVLMELFHFPPLTSKRGKIAWVFVVPVYWAVAYVIATAVPNIGDISSLVGAFCIGNFTYTFPALLKLGFDIKKNAMLPEESFDTETRRYTRLDDGWKRWWRGYKKSFWMSSFNILYFLGSLVVCGLGCYAAIEALISAFGKGGTTATHFSCTSPFAG

SEQ ID NO: 505 - protein, 619 aa, Aureobasidium melanogenum
MGSQNLANLTLGGGDPREEEKNPALFALDHGHEAPADTAVGFSIEAALVHNDPNVLFEEYLHYAAITRAEEREYEKTIEKKPFTFKGMIKSRFSTGHKQTFEDDNTKDGRTVAYTNAAEVTDLDWRRASRATRTATWTSIFFLITTDILGPTGAPWAFANTGFGPGVALYTVFGGLAALSGWYVYLTFLKLDSDRYPIRDFGQAFYRVFGAPMRHTVNILQTLQMFLLVAVLILNNGGAISEISIGENGKNGNGLCFIICLLILAILGVVLGQIRTLQRFGWLANLSVWTTVICSFLAIGASATSPPNFAVMLSTFGGKGTAYGNTNFPDGTIESHIPIKTFGGTPPYGYQSGGTGFLGSFQGIDQIIYAYGGAMLFFNLLAEMRNPWDFWKGMLAADIFIYVAYMFFGLFQYAYQGQYTYNTAIQSVGSYGLQTAGNILSIIGGLIAAALYGNIGIKVIYSNVLMELFNFPPLTAKAGKYIWIVLVPVYWALAFVVAAAVPLLGDFSSLVGAICIGNFTYTFPAMLRIGFMVKQAAMLPEETFDVATGKYHRVDSGIKRWMRGYRKTFVITTLNIIYFLGALVVCGLGCYAAIEALIQALSGGSVTTSFSCKSPYAAS

SEQ ID NO: 506 - protein, 604 aa, Daldinia fissa
MATHPPANLALDGGDPRKPSLQAGDGISGTASIEYTNNREVSFEEYMYHAAATRAQEEEANARYIAARGPQTFKNVIKGRFSKGHAEQDAYAEVVGSISRETDEKGHGNDALQVAGNGSTENYGITEAQRQTANRALRTASWGTVFYLITTDILGPTGAPWAFAQLGYGPGVALYTVFGAMSYYSGWILWKIFCGLDSDRYPIRGYGDFFFRMFGPWARHFVNLAQALQLLLNVSVIILSNGQSISQISRGSSGESLGICFVACMIIFMAAGFVLGQIRTLQRLGWLANLSVWLTVTLILLCMVSVIYGPNYAAVETSFGLSPGMPIRTYAGTPPPGMATGGVGFVASLNGLNVAVYAYGGALLFAALLAEMRHPLDFWKSLLVAEIFIYGMYMFFGIFMYSYQGQYTYNPAVQGIAAYGIQTAGNILSLISNLIAAVLYSNIGLKVVYIEVFHELLGFPELTTRTGKIWWAALIPLYWAIAFIIAAAVPQFSYIVGLVGALFILSFTYTFPAWLAIGYWVKKDAMIEGEERFDPATGTYNYVDHGWKRWRRGFMRKPFFNAFNIFYFLGALVTCALGCYSSIESLRQAFQSNIATSLSCTPPL

SEQ ID NO: 507 - protein, 602 aa, Monilinia fructicola
MAQPLANLALEGGDPRDPHHPIRGDATAVELAMLSAIHDPSISFEEYVYWAEITRAEEKIANEKFITAQGPRSWKSTIKNRFSRTKATPESYDSPPATTLAANEKDGLDEKSIVPGESDGSPRSAVSEAEWKRASRAVRTAGWSGVFYLITTDILGPFSVPWAFAQMGYGPGIALYTVFGLFALYSGWQIYNIYLALDSDKYPAKSYGDLFFRVFGTWARHGVNIAQSIQLLFTVSILILSNGQSISQISKGNLCFVVCLVVFMAAGMILGQIRTLQRFGWLANFAVWINVLIIFICMGVVANSAPNYATVEASFGDTFGPGPVHRYAGTPPAGKATGGDGFVGSLNGLNQAVYSYGGAMLFVAFLAEMRHPMDFWKGLLCADLFIYFVYMFFGIFVYSYQGQFSYNPVIQGLSPYNWQTAANIMNLITGLIAAVLYGNIGIKVAYVDVFQGILKAPPLTSKPGKLLWIAMVPFYWAIAFVVCAAIPQFSYISGLVGALCILQFTYTFPAILGFGYQIQKDAMLPGEESFDPQTGTYNYIDRGVKRWIRGFKVNWLFNIFNFLYFLGALTTAALGIYSSCLGLISAFDGSSAATSFGCTPPV

SEQ ID NO: 508 - protein, 626 aa, Trypethelium eluteriae
MAVNAGIGMAADPRLSIEADVVGSYPNRVLRTLHDPNVTFEEYLHYAKISRADEDRVYGPSSEYAAKKPGVVGRLVPGTQSMLGRFPGLNKETKQDVSIAQSEHGTQLQHFDKETLENPELRRKSLVSPNGETGRHSSGVDTSMISEQEWLSASRAARTATWGAVFYLITTDILGPFSVPWAMTQLGWGPGVSLYTIFGVLAAYSGWQLWKMFLALDSDRYPMKNYGDIAFRIYGNWARYFVNVLQSLQFFLNVGLLILSNGQSISQLSKSHLCFIVCLLVFMIAGFIVGQIRTLAKFGWLANISVWMNIFIIIATMGIVAHSQPNYVASGASYPDLFNTLPNGDPDTDHPAPIMTTAGSAPGLAFTDNVNGLMQAVFSYGGATLFTELMAEMRRPWDFWKGLICADLLIFCCYLFFGCFVYGYQGQYAFNPAYQGIDPYGWQTVGNVFGVITGLIAACLYGNIGIKVLYANIGRDLFNWPVLESRKGKLIFIPFVPIYWALAFVVTVSIPQFSNFSALVGAACILQFTYTFPPILLLGFKAQHDSILPEEKFDPQTGRVERVDNGMKRWIRGLRKDALVNLWDLVYFLGAVVTAILGMYSAIKSMAVNYNSNPNLTGWGCNSPTG

SEQ ID NO: 509 - protein, 589 aa, Cladonia uncialis
MAGTMGGAMNMDGGDPRMNSSAGLGFGVASEITRPAARKLHDPSITFEEYMHYAAITRADDRHVTIPQTDTALSVAGLKGLNPFAKKREPVVETVTQLNEKTTSSSSPDRQPYTITEEEYIQASRAVRTATWGAVFFLITTDILGPFSTAWAFRQMGYGPGAVLYTIFAAFAGYGGYLLWRMFLGLDSDKYPLRTYGDIAFRVYGQGVRIGVNLLQTFQLLFNVGIIIVTNGQSLSQMAAKGPNLDQNGACFIVLCFVWAIAGMLLGQIRTLARLGHLANFAIWLNVIVIIATMAVVAHSTPNYVAANTAYSINPGPVVTTAGPPAGVGFQGQIVGLMQAVYSYGGAMLFVEFMAEMKRPWDFWKGMLCAQTFIYFVYMLFGLFVYSYQGQFTIIIAYQGISSYAWQTVANAFGLTSGLIAALLYGNIGIKVVYNNVLMELFRFPSLATKAGKLAWVGVVPVYWAVAFVIASAIPQVSNLSGFIAAFCILQFSYTFPPFLHIGFQIQKAAIQSGEGFDPATGQTVRHDNGVKRWIRGYKKDFLLNTFHMIFFLGSFVTAVLGVYSAIVGMISSYATGATTTFSCNSPVL

SEQ ID NO: 510 - protein, 606 aa, Mollisia sp
MTSTGGAFASEGGDPRLSSDRIEELSNMRPQQRKLHDSSVPFEEYIHYAAITRAEEDADSKNDIGDTTFFSLIVPPKNAPGQTPVYTTSPQTPGDSKAIEVGSDRKSSSENLHNLSYAARSGVTDDEWTNASRAMRTATWAAVFYLITTDILGPFGVPFAMGTMGWGPGIALYTVFGGLAVYGGFLLYYMFLGLDSHQYPLRTYGDIAFRVYGRPVRYLISILQSIQLLLNVGVIIVSNGQALSQVSKFKLCYAICCLVFALAGFFLGQIRTLQKFGWMANAAIWMNVLVIVLSMGIIAHSAPNYLGIDASAGQALGGTLVTADANGNFPPIQTFAGLPPSTAGFTGALVGLMQAVYAFGGAMLFVEFMAEMRKPRDFWKGMICAQAFIYVIYMFYGCFIYGYQGQYAVNPSYQGVSSYNWQTAGNVIAFVSALIAAGLYGNIGVKVLYNNVFTDFFGAPPLNSRTGKIIWVAVIPVYWSIAYIVSAAIPNFFGLTSLVSALCIIQFSYSFPPFLYIGYLTRLGAMQEGEGFNPVTGVVTRHDGGIKRLIRGFLKRWPMNIWNTIYFLGALVTAGLGAYSSIEALIAAFKVPAITAFTCHSPLDAA

SEQ ID NO: 511 - protein, 607 aa, Pseudeurotium bakeri
MAVNMSNLALDGGDPRLDDGIGEGTPSYIGPQIRKAHDSSVAFEEYQYYAKLTRADQDTLYGPNVPVHLGVSVSEVSGVDSSPSSSKTSPQKTHDGNPLRHRKDLHDTAHTDRAGVSSEEWAMASRAVRTATWLSIFYLITTDILGPFGVAFAMGTLGWGPGIALYTAFGIMAAFGGWLLYRMFLGLDSYEYPMKTYGDVAFRVYGPTMRHMVNIMQTIQLLFNVGAIVISNGMALSQMSQFKLCYAICCLIWAVCGFFLGQVRTLQKYGFIATFAIFLNVLLMFINMGVVAHSPPNFLATGGSAGQALGGLSVTADASGLYPPIITTAGLPASTVGFTGGIVGLMQAVYAYGGAMLFIEFMAEMRRPRDFWKAMIFAQLFIYICYMFYGCFIYGYQGQYSVNPSYQGVSPYAWQTVGNAIAVVSALIAAGLYGNIGIKVLYNNLFVDLFKAPPLTSKRGKFFWAVITPIYWTIAFIISAAIPNFFGLTSLVAALCIMQFSYTFPPLLHLGFAIKEGAMLQGEGFNPSTGEVVRHDTGIKRWARGFFNGGFRGWKVYVNLFNILFFLGSAATAGLGAYSAVEALITAFQSPQITAFTCTSPLAPVSS

SEQ ID NO: 512 - protein, 585 aa, Acidomyces richmondensis
MEYSEKLPEQGMPRDNGKGYDSGSGTAIHPQQRRLHDPDVSFQEYVHYACLTRQEQDSLPKPQHGKNFLAYLIPNLQKLETGMLEASHTTVDINTSDREQRKTISDEEWVNASRALRTATAGAVFYLITTDILGPFGLPYAFATTGWGPGTALYTVFGAMAGFSGYLLWDCFMGLDSYQFPIKAFGDIGFRVYGTWCRYLFNILQAVQLICNVGAIIISNGEALSEAAKFKLCYAICCLVWALAGFILGQIRTLQKFGWLANVAVFINLTIMFITMGAAAHSPPLYSAAQQSAGASISSTLITPVNGKYPPVQHSNGLPSSGSFAGTLNGAMQAVYSYGGSMIFPEFMAEMRRPRDFLKGMWGAQIFIYICYMLYGLFIYGYQGQYVQTPAYLGISSYGLQTAGNSLAIVSALIAAALYGNIGIKVLYNNILVEFFKAPPLNSKVGKMLWIGLVPLYWSVAYVMAAAIPDFAGFTGIVAAACILQFTYTFPPLLHVGYSIQKAAMRSEPGFEQSTGEVVTLDRGIKRWIRGFFSGRWYLNIFNVLYFLAAMALCALGCYGAIENLIYAYSIPQLNAFGCTSPLDT

SEQ ID NO: 513 - protein, 578 aa, Hamigera striata
MNTKEDFNPKATEPTVINGSFGPIRPQMRLLHDPDVSFDEYYYYAQQTREEEERAPVPPKKAGGFLNYFIPNIQGEENDDEARVDINLSDLATRAGITDEEWTNASRAVRTATAGAVFYLITTDILGPFGLPYAFATTGWGPGVALFTVFGIMAGFSGWLLWHCFMGLDSYQFPVKSYGDLAFRLYGPWARHGFNVLQSIQLVCSVGAIIISNGQALSEASKFKLCYAICCLVWALAGFVLGQIRTLEKFGWLANFAIYINLLIMFISMGASAHTPPLYSAAASSAGYSVNIATVTPDANNVYPPVQHSAGLPDPSNFGASVTGLMQAVYAYGGAMIFTEFMAEMRRPRDFLKGMWGAQLFIYLCYMLYGLFMYAYQGQYTLNPSYLGISDYGLQTAGNVLAMVSALIAAALYGNIGVKVIYNSILVEFFKAPPLTNRRAKFYWMALIPVYWSIAYVIGAAIPDFSGFTAIVSAVCILQFTYTFPPILHLAFNIRKNAMLPGEGFDPLTGEITHHDSGIRRVIRGFCAKHWWMNAWNVIYFLGAGATAGLGIWAAVENLILIYAEPELNAFGCHSPLQ

SEQ ID NO: 514 - protein, 594 aa, Phaeoacremonium scolyti
MAKPGNMAIDGADPRVFGQMDSGAEAPVGSISTVKPQHRKPFDPNVSFEEYYYYAQQTRAAEAQQPKTNFETSVWSVIFPSKSGPGVAAASDSDNTEEKKTETRPHDRVIVSDDEWANASRALRTATRGAVFYLITTDILGPFGLPYAFATMGWGPGVALYTVFAALAGYSGYLLWEIFLGLDSYQYPVRSFGDLGYRLYGRWIRYLFNFLQAIQLLLNVGLIVISNGEALSQATKFKLCFCICCLIWALVGFVVGQIRTLQKFGWLANAAVWINLICMFITMGAAAHTPPNYAGASQSAGNVIDNGALITPDAQGNFPPVQTSGGLPNTGGFIGSVSGAMQAIFAYGGSMIFPEFMAEMKRPKDFLTAMWAAQAFIYFWYMFYGLFMYGYQGQYSINPSYLGISKYSLQTAGNVFAMVSAVIAAALYGNIGIKVIYNNVLVEILHAPPLTTRAGKIAWAGLIPIYWAIAFALAAGIPNFAGLTSVVAAFCILHFTYTFPPLLSIGFVIKKLAMLDGEGFDPATGQVNRRDNGLRRWSRGFLAKRWWFNILNFLYMLGALALGGLGAYSSIEILKDAFKTNTTTSYVCKSPLEG

SEQ ID NO: 515 - protein, 599 aa, Ophiostoma quercus
MENRASVSPNGDGTVLNPPAYETVGEDIQGIVRPQHRPIHDPRVTFEEYLYYAKQTRLEEEKQPVTGYEATFWSLVFPSKSDAGVQPAAKIETEAAAEKTANTGRKNSAAISDEEWANASRALRTATRGAVFYLITTDILGPFGLPYAIATMGWGPGVALFTVFAGLAIYSGFLLWDTFMGLDSYQYPIRSFGDLGYRLYGPWMRYLINSLQSIQLLLNVGLIVISNGEALSQVAKFKLCFVVCCLVWAIVGFIVGQVRTLQKFGWLANAAVWINLICMFITMGGAAHSPPNYAGAGSSAGATISGGSLVTPNAEGVYPAVQTSGGIPDTGGFIGSVSGAMQAIFAYGGSMVFPEFMAEMKRPKDFLTAMWAAQAFIYFWYMFYGLFIYGYQGQYTINPSYLGISNYGIQTAGNVFAMLSAVIAAALYGNIGIKVLYNNILVEMFHAPPLTTRSGKFFWVALIPVYWAIAFVLAAGIPNFSGLTSVVAAFCILHFTYTFPPLLSIAFSAKKFALLPNEGFNPATGFVFHELPAGDTRFKRLCRGFMSRERWWLNIINVLYVLGALALAGLGAYASIMTLRDAFKSNRTTSYVCKSPLDG

SEQ ID NO: 516 - protein, 602 aa, Talaromyces variabilis
MAQPASTMLDGGDPRLNEKERDLADAAEARSGVRPQHRSLYDSSVTFEEYHYYAQLTRAEEDNYPDHDKERGWLSVIFPSKSDGGVTQTSDGDSEPKDASGLNTSNPEVRHVISDEEWANASRALRTATRGAIFYLITTDILGPFGLPYAFGTMGWGPGVALFTVFAGLAIYSGYLLWQTFLGLDSYQYPVRHFGDLGMRLYGPWLRYLFNILQSIQLLLNVGLIVISNGEALSQVAKFKLCFIVCCLIWAIVGFILGQIRTLQKFGWIANAAVWLNLICMFITMGAAANQDPNYNAASQAAGSVIDGGVLVQQDAQGNWPPVTTSGGLPVSDGFAGSVSGAMQAVFAYGGSMVFPEFMAEMKRPKDFFTAMFAAQMFIYIWYMFYGLFMYGYQGQYTVNPSYLGVSGYGLQTAGNVFAMLSAAIAAALYGNIGVKVLYNNIFVEIFRLPPLTTKGGKIAWVALIPIYWAIAFIVAAAIPNFSGLTSVVAAFCILHFTYTFPPLLSLAFWVKKHAMQEGEGFNPDSGETVRHDSGFRRVMRGFFFPGFISSKFFYFSAFNIIYFFGALALAGLGAYSAIEVLIDAYASSVTTSFTCKSPVQS

SEQ ID NO: 517 - protein, 604 aa, Talaromyces sp
MAQPASVLGDRGDPRLHEKERDFADALEAREAREVREARRGIRPQHRVLHDSSVTFEEYNYYAQLARAEEDTYNDHDKERGWLSLLIPSKSDGAELKDAANINTSDKAVTATITDDEWTNASRALRTATRGAIFYLITTDILGPFGLPYAFGTMGWGPGIALYTVFAGLAIYSGYLLWDMFMGLDSFHYPIRHFGDLGFRLFGPWMRYLINILQSIQLILNVGLIVISNGEALSQVAKFKLCFIVCCLIWAIVGFLVGQIRTLQKFGWIANLAVWINLICMFITMGGASHYGPNYDSVGSAAGAVINGGVSVTQLPDGSWPPVQTSGGLPHSDNFAGTISGAMQAVFAYGGAMVFPEFMAEMKRPKDFLTGMWAAQLFIYFWYMFYGLFMYGYQGQYAANPSYLGISSYGIQTAGNVFAFLSAVIAAALYGNIGVKVLYNSIFVELFRFPPLTTKGGKISWVILIPIYWSLAFIIAAAIPNFSGLTSVVAAFCILHFTYTFPPLFAVVYWAKKFALQEGEGFQPESGEVVRHDSGFRRFMRGFFFPGFATSKYFYLSVFNILYMLGALALAGLGAYASIVTLKDAYATSVTTSFTCHSPVEPSS

SEQ ID NO: 518 - protein, 601 aa, Talaromyces calidicanius
MAQPASLMSDGGDPRLHEKERDFADALEAREVREARGGIRPQHRRLHDTSVTFEEYNYYAQLARAEEDTYTDHDKERGWLSLVIPSKSHGAELKNAANINTSDKAVVANITDDEWTNASRALRTATRGAIFYLITTDILGPFGLPYAFGTMGWGPGIALYTVFAGLAIYSGYLLWDMFMGLDSFHYPIRHFGDLGFRLFGPWMRYLINILQSIQLILNVGLIVISNGEALSQVSQFKLCFIVCCLIWAIVGFLVGQIRTLQKFGWIANLAVWINLICMFITMGGAAHYPPNYAGSGASAGAIINGGVSITQLPDGSFPPVQTSGGLPHSDNFAGTISGAMQAVFAYGGSMVFPEFMAEMKRPKDFLTGMWAAQVFIYFWYMFYGLFIYGYQGQYAVNPSYLGISSYGIQTAGNVFAFLSAVIAAALYGNIGVKVLYNSIFVEFFHFPPLTTKGGKISWVILIPIYWSIAFVIAAAIPNFGGLTSVVAAFCILHFTYTFPPLFAVVYWAKKFALQEGEGFQPENGEVVRHDSGFRRFTRGFFFPGFATSKYFYLSVFNILYFLGAMALAGLGAYASIVTLQAAFASSTTTSFTCHSPLDSSS

SEQ ID NO: 519 - protein, 605 aa, Rasamsonia argillacea
MAQPGSLMLDRGDPRLHEKERDQQDAIDLGHPPQYSGGVRPQHRKLHDPDVTFEEYYYYAQLTRAEEDRNRSHDGERSLLSIIFPSKSAGGVKQVTENVEKDVTTINTSDPAQRLTITDEEWTNASRALRTATRGAIFYLITTDILGPFGLPYAFATMGWGPGVALYTVFAGLAGYSGYLLWDAFMGLDSYQFPLRNFGDMGFRLCGPWMRYLFNFLQSIQLILNVGLIVISNGEALSQATKFQLCFIVCCLIWALIGFVFGQVRTLQKFGWLANMAVWLNLICMFITMGAAAHTPPNYQAASQSAGAVIEGGALITPIEPGVYPPVQTSGGLPNAGGFSGSVSGAMQAIFAYGGSMVFPEFLAEMKRPRDFLQAMWAAQAFIYFWYMFYGLFMYGYQGQYSINPSYLGISEYKLQTAGNVFAMVSAAIAAALYGNIGVKVIYNNIFVEFFRAPPLTTRAGKWVWVFIIPVYWALAFIIAAAIPNFSGLTSVVAAFCILQFTYTFPPMLSVAYWVKRNAMQAGEGFDPTTGQTTRHDSGFRRFLRGFFFPGWYANKRFYINVFNILYTLGALCLAGLGAYSAIEVLINAFQSSVTTSFVCKSPLE

SEQ ID NO: 520 - protein, 605 aa, Byssochlamys spectabilis
MAQPASLALDGGDPRLHEKERETLDAIDYGVATSQGVSISPQHRKLHDPDVTFEEYYYYAQLTRAEEDQHAASEETLKEKGFLSILFPTKDDGGIQQVSNNATRDASKMNTSNAATRMTITDEEWTNASRALRTATRGAVFYLITTDILGPFGLPYAFASMGWGPGVALFTVFAGLAGYSGYLLWESFLGLDSYQFPVRSFGDLGFRLYGPWIRHLFNILQSIQLLLNVGLIVISNGEALSQAAKFKLCFIICCLIWALVGFFLGQVRTLQKFGWLANAAVWINIVCMIITMGGAAHTPPNYTAASQSAGASIDGGILITPQNGVFPPVTTSGGLPNSGGFTGSVSGAMQAVFSYGGAMVFPEFMAEMKRPKDFLTAMWGAQAFIYFVYMFYGLFMYGYQGQYVVNPSYLGISKYSIQTAGNVFAMVSAAIAAALYGNIGIKVIYNTIFVELLKAPPLTTRAGKLAWAGLIPVYWGIAFVVAAGIPNFSGLTSVVAAFCILQFTYTFPPLLATAYWIKRAALRDGEGFNPTTGETIRQDSGIKRLFRGFANMEKKTLLMSMFNILYFFGALVLAGLGAYSAIEVLISAFKESRATSFVCKSPLDG

SEQ ID NO: 521 - protein, 598 aa, Penicillium rolfsii
MAQLGSLALDGGDPRLHTKEHEKIDILAASETSTAIPPQHRSLHDSSVTFEEYHYYAQKTRAEEDTMGGRETGWLSLIFPSKSDGGVQQTTTNVSKDASTINYTSKENRMTITDDEWTNASRALRTATRGAIFYLITTDILGPFGLPYAFATMGWGPGIALYTVFAGLAGYSGYLLWVTFLGLDSYQFPLRSFGDLGFRLYGPWMRHLFNILQSIQLLLNVGLIVISNGEALSQAAKFKLCFIICCLVWALAGFILGQVRTLQKFGWLANVAVWLNLICMFITMGGAANYPPNYAGASQAAGATLGDGSSVVAVNGVYPPVMTSGGLPSTGSFAGTVSGAMQAVFAYGGSMIFPEFMAEMKRPKDFLTGMWAAQAFIYICYMFYGLFIYGYQGQYTINPTYLGISKYSIQTAGNVFAMVTAIIAAGLYGNIGVKVIYNNVLVELFRFPPLTNKAGKFLWVALIPVYWAIAFVLAAGIPNFSGLTSVVAAFCILQFTYTFPPMLATLYWIKEAAMQDGEGFDPTTGQTVRHDRGIKRFIRGFMAQKPKYLMFSVFNIFYMLGALALAGLGAYSAITVLTDAFAHSTTNSFVCKSPLDEA

SEQ ID NO: 522 - protein, 597 aa, Penicillium limosum
MSQLGSLALDGGDPRLHAKEREKIDVLAANEMTTATRPQHRKLHDTNVTFEEYHYYALQTRAEEDNFGGRETGWFSVIFPSKSDGGVKQTTTNVSKDASAVNYSNHANRMTITDEEWTNASRALRTATRGAIFYLITTDILGPFGLPYAFATMGWGPGIALYTVFAGLAGYSGYLLWETFLGLDSYQFPLRSFGDMGFRVYGPWMRHLFNILQSIQLLLNVGLIVISNGEALSQAAKFKLCFIICCLVWALVGFFLGQVRTLQKFGWLANVAVWLNLTCMFITMGGAAHSPPNYAGASQAAGATIGDGSSVVAVNGVFPPVTTSGGLPSTGAFAGTVSGAMQAVFAYGGSMIFPEFMAEMKRPKDFLTAMWAAQAFIYVCYMFYGLFIYGYQGQYTINPSYLGISKYSIQTAGNVFAMVTAIIAAGLYGNIGVKVIYNNILVELFRFPPLTNKAGKFLWVALIPVYWAIAFVLAAGIPNFSGLTSVVAAFCILQFTYTFPPMLATYYWIKQAAMQDGEGFDPTTGNTVRHDKGFKRIVRGFMAQKPKYLMFSIFNIFYTLGALALAGLGAYSAITVLINAYANNITTSFVCKSPLDG

SEQ ID NO: 523 - protein, 597 aa, Penicillium simplicissimum
MSQLGSLALDGGDPRLHTKEREKIDVLKANEISSGTRPQHRNLHDPSVTFEEYHHYAQLTRAEEDSFGGRETGILSIFFPSKSDGGVQQMTSNVSRDASAINYSDKANRMTITDEEWSNASRALRTATRGAIFYLITTDILGPFGLPYAFATMGWGPGIALYTVFAGLAGYSGYLLWVTFIGLDSYQFPLRSFGDIGFRLYGPWLRHLFNILQSIQLLLNVGLIVISNGEALSQAAKFKLCFIICCLVWALAGFFLGQIRTLQKFGWLANLAVWLNLTCMFVTMGGAAHSPPNYAGASQSAGATIGDGSSVVPVNGVYPPVMTSGGLPSTGNFAGTVSGAMQAVFAYGGSMIFPEFMAEMKRPKDFLTAMWAAQAFIYICYMFYGLFIYGYQGQYTVNPTYLGISKYSIQTAGNVFAMITGLIAAGLYGNIGVKVIYNNIFVELFRCPPLTNKAGKFLWVALIPCYWAIAFVLAAGIPNFSGLTSVVAAFCILHFTYTFPPMLATYYWIKEAAMQDGEGFDPATGNTVRHDSGMKRLIRGFMSLKARYKIFSIFNIFYFLGALALAGLGAYSAITVLIDAYANNTTTSFVCHSPLDG

SEQ ID NO: 524 - protein, 600 aa, Penicillium parviverrucosum
MAQLGNLALDGQDPRLYHDKENEKTVDLPPEYSSGAIRPQHRKLHDTRVTFEEYYYYAKRTRAEEDSLPRPEKESGILSIIFPSKSDGGVKQETENVSRDATAMNTSDPANRMTISDEEWANASRALRTASRGAIFYLITTDILGPFGLPYAFATMGWGPGVALYTVFAGLAGYSGWLLWETFLGLDSYQFPLHSFGDLAFRLYGRPLRYLFNVLQSIQLILNVGLIVISNGEALSQATKFKLCFIICCLIWALVGFFLGQIRTLQKFGWLANAAVWFNLICMFITMGGAAHSPPNYAGASQAAGANIGDGSSVQPVNGVYPPVVTTGGLPDPSDFAASVSGAMQAIFAYGGAMVFPEFMAEMKRPKDFLTGMWAAQAFIYFCYMLYGLFIYGYQGQYTINPTYLGISKYSIQTAGNVFAMLSALIAAGLYGNIGLKVLYNNVMVEIFRCPPLTTRAGKWMWFGLIPVYWAIAFIIAAGIPNFSGLTSVVSAFCILHFTYTFPPLLATLFWIKEAAIGDGEGFDPATGNTVRHDRGAKRLLRGFLAQGPKRMIFSICNVFYFLGALALAGLGAYSAITSLMSAYQKSVTTSFTCTSPLDG

SEQ ID NO: 525 - protein, 598 aa, Penicillium sclerotiorum
MSQLASLAVDGDPRLHEKEREAIDNLSVASPGGGAIRPQHRKLHDNSVTFEEYYHYAQLTRAEEDQSSTPETGVLSIIFPSKSDGGVQKTSEHGAKDAAALNTSDPATRMTITDDEWNNASRALRTATRGAIFYLITTDILGPFGLPYAFATMGWGPGIALYTVFASLAGYSGYLLWDTFLGLDSYQFPLRSFGDMGFRLYGPYMRHLFNFLQSIQLLLNVGLIVISNGEALSQAAKFKLCYIICCLIWALVGFFLGQIRTLQKFGWLANAAVWLNLLCMFVTMGGAAHSPPNHAAYTQTAGYTIGNGSSVTPNANGVFPPVKTTGGLPDPSDFAASVSGAMQAVFAYGGAMVFPEFMAEMKRPKDFLTGMWAAQAFIYFCYMLYGLFMYAYQGQYSINPTYLGISKYSIQTAGNVFAMLSGVIAAGLYGNIGVKVIYNNIFVEFFRCPPLTAKAGKLMWVALIPVYWAIAFVLAAGIPSFSGLTSVVAAFCILQFTYTFPPMLATLFWLQKYALSDGEGFDPSTGETVRHDRGIKRLARGFRNMGTKRIIFSSFNVLYFLGALALAGLGAYSAITGLISAYASEVTTSFTCKSPLDS

SEQ ID NO: 526 - protein, 598 aa, Penicillium fellutanum
MSQQEEFGDEKTGDSVTQVQDKPLAYGNTIRPHHREPHDSKVTFEEYHHYAKLTRAEEDNSTTPETGFMSIIFPSKNDGGVQQTEENATRDASAMNTSDRATRLTITDEEWTNASRALRTASRGAIFYLITTDILGPFGLPYAFASMGWGPGIALYTVFAGLAGYSGYLLYDTFLGLDSYQFPLRSFGDMGFRLYGHWIRHLFNILQSIQLVLNVGLIVISNGEALSQAAQFKLCFIVCCLIWALIGFFLGQIRTLQKFGWLANAAVWFNLLCIFVTMGGAAHSPPNYAGASQAAGAGISSGFNNGTATLVSPLADGSFQPVKTSGGLPDPGSFGASVSGAMQAVFAYGGSMVFPEFMAEMKRPKDFLTGMWAAQAFIYFVYMLYGLFMYGYQGQYSINPTYLGISKYSVQTAGNVFAMLSGVIAAALYGNIGVKVIYNNIFVGIFRCPPLTTKSGKFLWVALIPIYWAIAFVIAAGIPSFSNLTSVVAAFCILQFTYTFPPLLATLFWVKKYALADGEGFDPVTGKTVYHDSGFKRFARGFTHMGTKRIIFGVFNFFYFFGALALAALGAYSAITGLMSAYSESVTTSFTCKSPLDG

SEQ ID NO: 527 - protein, 596 aa, Aspergillus cervinus
MAQLASLALEDPRLMDEKEVVDILNGGIRPQHRDLHDSSITFEEYHHYAQLTRAEEDHQQDSQSHDKERGWLSIIFPTKSDGGIEQVTDNVSKDATELNISNKETRMAITDEEWTNASRALRSATRGAVFYLITTDILGPFGLSYAFATMGWGPGIALYTVFAGLAIYSGYLLYVAFLGLDSYQFPVRSYGDLGFRLFGPWARHLFNILQAIQLILNVGLIVISNGEALSQATKFKLCFIICCLIWALVGFVVGQIRTLQKFGWLANAAVWINLICMFITMGGAANGPPNYSAVGSSAGQVIGNGSLVQQLPDGSWPPVQTSGGLPASDAGFTGALNGAMQAVFAYGGAMVFPEFMAEMKRPKDFLTAMWAAQAFIYFWYMFYGLFMYGFQGQYSVNPTYLGISQYGIQTAGNAFAMASAVIAAALYGNIGIKVLYNNICVELLHFPPLTTRGGKLAWMGVVPVYWALAFVIGAGIPNFSGLTSVVAAFCILQFTYTFPPLLATAYWIKQAAMKDGEGFDPATGATVRQDGGIKRVFRGFFAQGRKELMMSLFNILYFLGAMALAALGAYAAIESLISAFKTSTTTSYTCTSPVQG

SEQ ID NO: 528 - protein, 615 aa, Talaromyces variabilis
MAQPGSLMQGESGDPRLHAEERQVLDAIEHSREKEVLASREKELNSNEKHQDSSIKPQQRLIHDPDVSFAEYYHYSRQTRAEEETHPTVGKTGMMGILFPSKSGPGAGHTSDEDEAKENNVHVTGSLEARAVISDDEWAQASRALRTATQGTAFYLITTDILGPFGLPYAIATVGWGPGVALYTVFAALAGYSGYLLWDVFLGLDSYQFPVRSFGDIGYRIYGKYMRYGLSILQGLQLLLNVGLIVMSNGGALSQASKEKLCYIICCLVWALLGYFSGQIRTLQKFGWLANAAVWINILCMLVSMIGAGKYGPSYGSIDSSAGINIDPALVTPINGTYPALQTSGGIPPSPNGFVGAVGGAMNAVFSYGGSMVFPEFMAEMRKPKDFLWAMWAAQFFIYVVYMFYGLFLYGYQGQYVANPSYLGIASYGISTAGNVLAMLSAAIAAALYGNIGLKVLYNNVFVEILNFPPLTKTSGKLIWIGFIPIYWSIAFIVGAAIPNFSALTQVVAAFCILQFTYTFPPLLHIGYKIKQAALADQATFDPATGAAPQKLGFKDYIRYFFAQRWYLNVLHVIYFLGALALAGLGAYAAIETYKAGFASGVTTSFTCTSPFGSS

SEQ ID NO: 529 - protein, 598 aa, Rhytidhysteron rufulum
MAAVGAFLAGGEDPRLSIEATHASPIAPRQRSLHDPNVTLEEYIYYAQKTRAEEEASYKLDAPKTGILQVIFPPKNGPSAIRSESPEVGARLAETEKRGEVLNLARKGDRAHVSDEEWSNASRALRTATWAACFYLITTDILGPFGIGFAIGTLGFGPGIALFTVFGLAAGYGGYLLWMMFMGLDSYEYPLRNYADLAYRIFGPIPRHFINVLQSLQLLCGVGLIVISNGQAISQVSKFRLCYAICCLIWAICGFGIGQVRSLQKYGWIANLAIWINLLLMFISMGVIAHSPPNYSVAAFGSAGSTTVPADVTPDENGVYPPIKHYAGIPNPDSLIGSINGLMQGVYAYGGAQLFIEILAEMRRPRDFLKAMFSAQLFIYIAYMFYGLFVYSYQGQYTYTLSYLGVSPYGWQTVGNMLAVTSGIIAAGLYGNIGIKVLYNNILMDLFGFPPLNTRGGKLAWAGIVPVYWSIAYLVAAAIPDFFGLVSVVSAFAIVQFTYTFPPLLALGFVVHKNAMLPDEGFDPRTGRVGRSDAGVKRWVRGFLKGPWWFSVGCVLHVGAAVVVAGLGAYAAVKGLVEAFRVPQVNAFSCRSPLDGGL

SEQ ID NO: 530 - protein, 587 aa, Leptoxyphium fumago
MATLAPAAVVGDGGDPRLSADASRPPVYTARADHDAGAHPGAMMVHDPNILIEEYMYYAKLSREEERSLEAPSNPWLIALGLAKKNQSAETVGQASDAAEDEKNGKTDSAATAVRPSPVSDAEWHQAQRAARTAGWGAMFFLITTDILGPFSVPWALSQMGYGEGIALYTVFGVMAFYAGWQIWRMFLQLDSTKYPMKSYGVIAYRVYGPWVRHLVNFLQSLQLIFNVGVIIIGNGQGLWQINSKICYTVCCVIWAVCGMVIGQIRTLQKFGWIANIAVWMNVVVMIMTMAVVANSLPNYDIAMVLNSMTIDTPPAPVHVTGSVPPGSKLTDQIVGLMQAVYSYGGAMLYCEFLSEMRRPMDFWKAIVCAESFIYGCYLFFGVFVYSYQGQYTVNPANQGLSLRGPLVAGNIISLLSALIAAGLYGNIGIKVIYQNLLQEFLHFPDLTSTKGKFAWVACVPVYWGIAFVLAAAIPNFSALSGLVAALCILPFSYTFPPLLMIGLETQRDAVQPGEGFDPATNRVIRHDNGWRRWARGYMAKQWYVKMFNTFFFLGSVVTLVLGAYSAIVGIIDAYDGGYASPFGCTP

SEQ ID NO: 531 - protein, 571 aa, Cladosporium cladosporioides
MAMPLAATVARDKHDPLILSPGAETVPAARSTQGSVVTIEEYMYWAAITRHEESLLPKIKGPVAKLLGSSKSDAATHSTRSEAPTTEMKDLKAAPPTAVSVSDGEWHNAQRAARTAGWAAVFYLITTDVLGPYTVPWAMAQMGYGPGISLYAVFGALAGYTGWQLWRMFLQLDSDRYPMSNYSDIAFRIYGPFARHIVNVLQSIQLFCLVGVIIIGNGQGLYQINGNICYVVCCVIWSVLGMFLGQIRTLQRFGWIANFAVWMNVIVMVMVMAVVTHGEPNYEAASNQNGIDTTPPIPTVTTSGGAPPDIDFSGQVLGLMQAVFSYGGAMVYCEFMSEMRRPLDFWKALLIAEAFIFSVYIFFGVYVYSFQGQYVINPANQGMSMRGPLVAGNILYLVTGLIAAALYGNIGIKVLYQACFKELLHLPDLGSKKGKWIWVFFVPIYWALAFLLAAAIPNFSALSGFVAALCIMQFTYTFPPLLMLGLAAQRDAVREDEGFDPSTGLTTRHDKGAKRWIRGFMAKRWYVKLFNAVIAVGALVTAGLGMYSSIEGIMDAFSGGRSTAFSCTGPV

SEQ ID NO: 532 - protein, 617 aa, Penicillium bilaiae
MAGIVSAANLGGVADPRLGDEADIIGTEKEHPNIDIHHDIEPPILYGTGSVYLDSNITFENYHYWANRSREVEKHIRTDTAGFAAIGNLLLNRKGKQEEPAAEPTEPVSVAEKSEFDTKTTNAPGAETARTDESTDRWGVSETEWEQAQRAARTATWGSIFYLITTDILGPTNVPYAISRMGYGPGFALYTVFGLMACYSGLQLWRMFTGLDSTRFPMRNYGDLAFRVFGNWARIGVNVLQSFQFFLNVSLLIESNGQGLAQMVAGVNNTGGFLCFIAAEVIFMVIGFVLGQIRTLQRLSWLANLAIWGNVIVIIMTMVVVYKYPPNYDAVKTSYGIEKGPIVTSATWPTGLDLNDKVTAMMNAVFAYGGATLFNELMAEMRRPFDFWKGFICAELFIYVCYLVNGMVVYAAQGQFVYNPAYEGIPNTPGAYRFQTLGNALSFVTGAIAALLYGNIGIKILYSSVLRDVFHFPPLDSKLGKWLWVGLVPVYWILAFVIAGAIPQISNLTSFVGAACILQFSYTFPPLLLVGYHVQKDAMLPEEQFDPRTGQAQRVDHGIRRWIRGYKKKFWWNTFDLVYSLAALALAGLGIWASVVSMNKTFETTKLTPFTCTNPAG

SEQ ID NO: 533 - protein, 620 aa, Gamarada debralockiae
MAGIVSAANLGGVADARLGNEADVIGTNDEHRGGVSHDIPPPDSHGHNTIYLDSSITFENYHYWANRSREFEKHIRVDNVGLAQLGNLLLGKKIPNEPPEVDNSENVPGNTISERVLENDEKNTISNEKTSGNSTTGSNGGWSHGVTEAEWEQAQRATRTATWGSVFYLITTDILGPYNVPWAISQMGYGPGAALYTAFGILAYYSGMQLWKIFIGLDSTRYPMRNYGDVAFRIYGNWARVIVNFLQSFQFFLNVVLIIESSGQGLAQMAAGANGNGFLCFMVAEVIFMLLGFLLGQIRTLQRLAWLANLAIWLNIIVIIMTMVVVHQYPPNYAASLTTFNTPQGPIVKSANWPPGTTLFDRINGLMNCVFAYGGATLFNELMAEMRRPYDFWKGFICAEIFIYSCYLIMGMVIYSAQGQFAYNPAYQGIPNSAYRFQTLGNAVSFISALIAALLYGNIGIKVFYSAVLRDVFRLPPLDKRFGKLLWVALVPIYWALAWIIAAAVPQISNLTSFVGAACILQFSYTFPPILLVGYNCQKDAILPEEEFDPRTGVANRVDNGWKRWMRGYKKKFAINTFDVLYSLAALATAGLGLYASGTGMHETFASTPLTPFTCKNPAG

SEQ ID NO: 534 - protein, 606 aa, Pseudocercospora pini
MAGIVPAGNLAVADPRMSAEADNIGTRRDSIIKDTAPPDAHGHNTIYLDSSITFEAYEFYAARAREAEKHFTTESVVKQVSKVLVGKKVAKEQQPVDEYPTGTSEKDPKHELASPPSNGSDTAPGEDRFGVTETEWEQAQRATRTATWVTIFYLITTDILGPYNVPWAISQMGYGPGIALYVVFGLMAFYSGLQLWKMFIGLDSPRYPMRNYGDLGFRVFGGWARQIVNVLQSCQFFLNVTLLIESNGQGLQQMAAGKNGNGVLCFVAAEVIFMVCGFLLGQIRTLQRLGFLANLAVWLNVFVILMTMGVVPSFGPNYQASFATYKTPPNQPVRTSANWPEGTTLMDRINGLMNGVFAYGGATLFNELMAEMRRPMDFWKGFICAEIFIFSVYITMGMVVYSYQGQYTFNPAYQGIPNSAYAWQTVGNAISFVSGLIAALLYGNIGVKVFYAAVLRDVFRFPPLDDKKGKLVWIALIPIYWALAFIIAASIPQISYLISFVGAAFILQFSYTFPPILMVGYNIQKDAMLPEEHFDPASGEATRVDSGMKRWVRGYMKKPFRNTFDILYFLGALATAGLGIYASVVSMHDSFQTTNLTPFTCNSPTG

SEQ ID NO: 535 - protein, 619 aa, Rachicladosporium antarcticum
MATLSHSYPGGQGSETPANMTSFANIGGVADPKLGHEADNLGRGSVGGTGQEIHDAAVASGGARRNSHIYTDTNITFEDYHYWANRSREYERTIDVSNAGLAGSMKTILGRKQDKEPAALASSSHSGSDNEKTDAAHGESRYGISESEWDNAQRAIRTATWGSIFYLITTDILGPYNVPWAISNMGYGPGFALYTVFGGMAAYSGWQLWQCFIGLDSTRYPLRNYGDLAFRVFGPSARMVVNILQSFQFFLNVSLIIVSNGQGLAQMALGKNGNGYICFVVAQVVFTVLGFLFGQIRTLQRLSWLSNLAIWLNVIVIIMTMIVVHEYPPNYAAAATNGIERGPVVTSAGLPPGKGLMDNINGLMNCVFAYGGATLFNELMAEMRRPMDFWKGFICAEIFIYCVYLIMGMVVYNAQGQFTYPVAFQGIPGVGGAYNWQTLGNAISFVSALIAALLYGNIGIKVVYASLFRDVFKFPPLDTKKGKLIWVAFAPIYWALAFVVAAGIPQIANLTSFVGAACILQFSYTFPPILQVGYNCQKDAMLDTERFDPATGVAEREDSGVKRWIRGYMKKPFKNSFDVVYATGALATAGLGLWASIIGMHNTFKETAITPFSCVNPAG

SEQ ID NO: 536 - protein, 579 aa, Taphrina flavorubra
MSDLALVELSHEGHVLQAPIDQLRSKEVACVVKDEELVNGHESINEEQRRQSESLSAYLYYADRARQSNQTNAQAQDLDRHEDGITSSVPAVRSGNLFRGEDDIYGVTTTERQQADRAVKTATWMGAFFLLTTDVLGPYSVPFAFAQLGYGSGVILFTVMMLCAAYSAWILWRLFLKLDSPEYPVINYGDLAYKIFGNAARIGVSSLQALQLWFNVGVIILVNAQALSQVASDKVCFSVLALIWAIVGMLLGQIKTLQRFGALANFSIWINLTCLVIIMAVVVRSPPNYSTALAQYGQDVVNIVHPAAVSVPAFSTGALNTQIVAVMQIVYSYGGATIFVELMAEMRRPFDFWKALVLSQLTIYVCYLIFGIFVAHYQGQYAINPASQGLSPYAWQTVANVLNLLASIIAAVLYGNVGLKVLYSLLIQKALKGPPLNSPRGRIWWTILIPTYWVLAFILASAIPQFNNISALVAAVCILQFSYTFPPLLMLAFTVQRDASVAEQFDAFTGIVHRIDTWSTLGRWKRGLRRRWYIKAFNFILFLASASLAGLGMWAAISSLRETFSTNKTVTSFTCKAPV

SEQ ID NO: 537 - protein, 625 aa, Ustilaginaceae sp
MGVKEFFARAKSVEIERTHHTSNKEETHQSDLPGQGVPGLAPVPALYEEPARSDITLEEYMFYAQVQREQEKLYGAAGVAVEANAPEGKGFLHDSKQEKKHSSSEEVSQHSTVIETGVAKPTVNNTDVSTFDQLDGLSETEKESRNAHRAIKTATWIAVFYLITTDILGPYGAPYAMSQNGYVTGNVMYVVMGFCAWWCGLLLWKLFTQLDSARYPIKTYGDLGERVVGTPMRWTFNALQTIQLIINVGLLCLTNGQALSQVISGAPGNANLCFSVCVVIFSLIGMGFAQVQTFRGLGFAASTAVYQNIAIVVISMAAIIKYGPYIAGAQASYGKDYPYNNQPVMTSAFVSYDITQKVNGLMNMVFAYGGAMIFPELMSEMRRPMDFWKGMISAQALICTVYLVYANVVYAYQGQYVLGQSYNGIAKYSFQTVCNMLAILSGTIAAALYGNVGLKVVYVNTVQAFFKGPALNSPRGRVIWASISVVYWALAFVVGSAIPQVQTISGLIAAIAIMNFSYSFPFMLALIFYIKRDAMVGDTPFTPGSPAQRQDTWSQWSRWERGLFGGRFEILGIAIPGIVVKVVLLIFTLGSYTLSGLGMYGSGESIKATFDSTAAATSFGCAAPV

SEQ ID NO: 538 - protein, 620 aa, Ustilago filiformis
MGIKDAVEHAMAHEVERSHHTSNQEETHQSDLPGQGVPGLAPVPALYEAPPQSGISLEEYMFYAQIQREQEKLYGAAGIAVERNAPNGAGYLEDANEKHVSEKTSQHSGSAGGVKPHINNTDASTFDQLDGLSEVEKESRNAHRAIKTASWVGVLYLITTDILGPYGAPYAMSQNGWVTGNVMYIVMGFCAWWCGMLLWKLFMQVDSARYPVKTYGDLGERIVGYPLRWTLNALQTLQLIINVGLLCLTNGQALSQVIRGAPGNANLCFSVCVVIFALIGMAFAQVQTFRGLGFAASTAVYQNLIIVVVSMAAIIKYGPYIAGAQASYGTDYPYNNQPVMTSAFVSYDISQKVNGLMNMVFAYGGAMIFPELMTEMRRPMDFWKGMISAQALICTVYLVYANVIYAYQGQYVLGQSYNGIGKYAFQTVCNMLAILSGTTAAALYGNVGLKVIYVNTVQSLMKGPALNSPRGRVIWASIAVVYWALAFVIASSIPQVQTISGLIAAIAIMNFSYSFPFMLALIFYIKRDAMEDDVPFTPGYSGQKQDTWGQWSRWKRGLFGGHYEILGVVIPGMVVKIVLLIVTLGSYVLSGLGMYGSGESIKETFASSAAATSFGCAAPV

SEQ ID NO: 539 - protein, 618 aa, Pseudozyma tsukubaensis
MGVKNFIHEETAHTSNKQETHQSDLPGQGVPGLAPVPAVYEDAPITGVSLEEYMFYAQIQREQEILYGAAGVSVESDAPHGAGYLDSAREKQSSSEKVSEHGTVVGASKPHIGNTDASTFDQLDGLSDMQKEQRNAHRAIKTATWVSVFYLITTDILGPYGAPYAMSQNGWVTGNIMYIVMGFCAWWCGIILWKLFMQVDSARYPVKTYGDLGERIVGYPMRWTFNALQTLQLIINVGLICLTNGQALSQVISGAPGNATLCFSVCVVLFALIGMAFAQIQTFKGLGLAASTAVYQNIAIVVISMAAIIKYGPYIAGAQASYGTDYPYNNQPVMTSKFVSNPITAKVNGIMNMVFAYGGAMIFPELMSEMRRPMDFWKGMIGAQLLIVTIYLVYANVVYAYQGQYVLGQSYNGIAKYSFQTVCNMLAIISGTTAAALYGNVGLKVIYVNTVQTFFKGPALNSPRGRVIWAVISVVYWALAFVIGSSIPQVQTISGLIAAIAIMNFSYSFPFMLALIFQIKKDAMEGDVPYTPGYTGQRQDTWSDWSRWQRGLFGGHYEYNVFGKNVVVPGIAVKILLLIMTLGSYTLSGLGMYGSGESIKETFAAGGAATSFGCSAPV

SEQ ID NO: 540 - protein, 611 aa, Ustilago williamsii
MSFLKKGWLTGQSQEKTDEPQQTAMPGQGVPGSQPVPAHYEEPVRKGVSLEEYMFYARIQREQEKLYGAAGIAIEASAPPYTPSEDNKGASDEKINAHGASKPKVNNVDASVFDQLEGLSDKEKERSNAHRGLKTATWIAIFYLITTDILGPYGAPFAMSQNGWVTGNILYVVMGFAAFVAGLALAKLFLATDSARYPVKTFGDLGERIVGYPIRYLFNLLQTLQLIINVGLICLTNGQALSQVIGNAPGNHHLCFSVCVVLFSLIGMAFAQVQTFKGLGYAASTAVYQNLIIVIVSMIAIGIYGPYIHGAQLSYGTDFPYNNQPVITEAFVSYPIAKKINGIMNMVFAYGGAMIFPELMSEMRRPMDFWKGMVCAQLFICTVYLVYANVIYAFQGQYVVGQSYNGIAKYSFQTVCNVLAIISGTIAAALYGNVGLKVVYVNTVEILFKGPAFNTRKGRPIWAAVSVVYWALAFVVASSVPQVQTISGLIAAIAIMNFSYSFPFMLMLIYYIKSDAMEGDTPYTPGQPAVRQDTWRHWTRWQRGLFGGLYHAQLGSKRVAIPGILIKALLLVVCLGSYTLSGLGMYGSGESIKEVFESTAAATSFGCAAPV

SEQ ID NO: 541 - protein, 575 aa, Yarrowia deformans
MPEKTVYNPEVEEVHGEVQEAQLQVRTTNELLDATEPFQIYYHYAAIQRAREDAFPSFKFRSLFDKFTPNSQELLGEDTHSDDTGPSDVDAEKHVGGIISQIPGASKELAIANMSARTATWMSVFFLITTDILGPQSAPWAISKLGWFPGIMLFTVLGVAAVYTGWLIYRMFLKLDSPEFPMKSFGDLALCIFGKGFRWGIDFLQSIQLLCNVAVIILGSGQGLSQIYSPLCFSVWCIIFMIAGMLLGQIKRLSNFSYVANAAVWMTLFVVFATMGIAATKPPNFVGGAQQNNLPNSTDPVRTKAIEKYPFQDQLGAVMNIVYSYGGAMVFVEFMSEMRKPREFLKGMLSAQGVIFVCYLLYGLFVYAFQGQYVVNPANQGLGSKNWQIAVNVVSLVSSLIAAGLYGNVGIKVVYMTIIRRAIPALPGLDEGIKGRIAWALMVFFYWAVAFVIASAIPQFSSLTALIGAACILQFTYTFPPLMYMGLIIREEASKMDIVDFENRAVTKYDSWKSWARWERGLMSRPWWVLGNFVLFLASLATAILGIYSSIYSLVQAFNAPGATTVSFGCNPPVA

SEQ ID NO: 542 - protein, 9 aa, Artificial Sequence
  Synthetic construct amino acid sequence
  MISC_FEATURE (2)..(2): X = I OR L
  MISC_FEATURE (6)..(6): X = I OR V
LXTTDXLGP

SEQ ID NO: 543 - protein, 6 aa, Artificial Sequence
  Synthetic construct amino acid sequence
  MISC_FEATURE (1)..(1): X = V OR I
  MISC_FEATURE (2)..(2): X = F OR Y
  MISC_FEATURE (3)..(3): X = A OR S
  MISC_FEATURE (4)..(4): X = F, Y OR W
XXXXGG

SEQ ID NO: 544 - protein, 8 aa, Artificial Sequence
  Synthetic construct amino acid sequence
  MISC_FEATURE (2)..(2): X = M OR L
  MISC_FEATURE (3)..(3): X = A, K OR R
  MISC_FEATURE (4)..(4): X = H, K, N OR R
  MISC_FEATURE (6)..(6): X = Any naturally occuring amino acid
  MISC_FEATURE (7)..(7): X = D OR E
EXXXPXXF

SEQ ID NO: 545 - protein, 14 aa, Artificial Sequence
  Synthetic construct amino acid sequence
  MISC_FEATURE (2)..(2): X = Any naturally occurring amino acid
  MISC_FEATURE (3)..(3): X = Any naturally occurring amino acid
  MISC_FEATURE (6)..(6): X = G OR S
  MISC_FEATURE (8)..(8): X = I OR V
  MISC_FEATURE (9)..(9): X = A, G OR S
  MISC_FEATURE (10)..(10): X = I, L OR V
  MISC_FEATURE (12)..(12): X = Any naturally occurring amino acid
  MISC_FEATURE (13)..(13): X = Any naturally occurring amino acid
AXXLYXNXXXKXXY

SEQ ID NO: 546 - protein, 9 aa, Artificial Sequence
  Synthetic construct amino acid sequence
LITTDILGP

SEQ ID NO: 547 - DNA, 700 bp, Saccharomyces cerevisiae
aagaggatgtccaatattttttttaaggaataaggatacttcaagactagattcccccctgcattcccatcagaaccgtaaaccttggcgctttccttgggaagtattcaagaagtgccttgtccggtttctgtggctcacaaaccagcgcgcccgatatggctttcttttcacttatgaatgtaccagtacgggacaattagaacgctcctgtaacaatctctttgcaaatgtggggttacattctaaccatgtcacactgctgacgaaattcaaagtaaaaaaaaatgggaccacgtcttgagaacgatagattttctttattttacattgaacagtcgttgtctcagcgcgctttatgttttcattcatacttcatattataaaataacaaaagaagaatttcatattcacgcccaagaaatcaggctgctttccaaatgcaattgacacttcattagccatcacacaaaactctttcttgctggagcttcttttaaaaaagacctcagtacaccaaacacgttacccgacctcgttattttacgacaactatgataaaattctgaagaaaaaataaaaaaattttcatacttcttgcttttatttaaaccattgaatgatttcttttgaacaaaactacctgtttcaccaaaggaaatagaaagaaaaaatcaattagaagaaaacaaaaaacaaa

SEQ ID NO: 548 - DNA, 250 bp, Saccharomyces cerevisiae
acagaagacgggagacactagcacacaactttaccaggcaaggtatttgacgctagcatgtgtccaattcagtgtcatttatgattttttgtagtaggatataaatatatacagcgctccaaatagtgcggttgccccaaaaacaccacggaacctcatctgttctcgtactttgttgtgacaaagtagctcactgccttattatcacattttcattatgcaacgcttcggaaaatacgatgttgaaaat

SEQ ID NO: 549 - DNA, 1200 bp, Saccharomyces cerevisiae
ctgctgtaagcagcagcacgggtggccaaagcaaaggttctcttagcagtgatgacacgggagttgcagatcaatctggcggcttgagttctcaacatgttttattttttacttatattgctggtagggtaaaaaaatataactcctaggaataggttgtctatatgtttttgtcttgcttctataattgtaacaaacaaggaaagggaaaatactgggtgtaaaagccattgagtcaagttaggtcatcccttttatacaaaatttttcaattttttttccaagattcttgtacgattaattattttttttttgcgtcctacagcgtgatgaaaatttcgcctgctgcaagatgagcgggaacgggcgaaatgtgcacgcgcacaacttacgaaacgcggatgagtcactgacagccaccgcagaggttctgactcctactgagctctattggaggtggcagaaccggtaccggaggagaccgctataaccggtttgaaaagaggatgtccaatattttttttaaggaataaggatacttcaagactagattcccccctgcattcccatcagaaccgtaaaccttggcgctttccttgggaagtattcaagaagtgccttgtccggtttctgtggctcacaaaccagcgcgcccgatatggctttcttttcacttatgaatgtaccagtacgggacaattagaacgctcctgtaacaatctctttgcaaatgtggggttacattctaaccatgtcacactgctgacgaaattcaaagtaaaaaaaaatgggaccacgtcttgagaacgatagattttctttattttacattgaacagtcgttgtctcagcgcgctttatgttttcattcatacttcatattataaaataacaaaagaagaatttcatattcacgcccaagaaatcaggctgctttccaaatgcaattgacacttcattagccatcacacaaaactctttcttgctggagcttcttttaaaaaagacctcagtacaccaaacacgttacccgacctcgttattttacgacaactatgataaaattctgaagaaaaaataaaaaaattttcatacttcttgcttttatttaaaccattgaatgatttcttttgaacaaaactacctgtttcaccaaaggaaatagaaagaaaaaatcaattagaagaaaacaaaaaacaaa

SEQ ID NO: 550 - DNA, 19 bp, Artificial Sequence
  Artificial DNA primer
ctgctgtaagcagcagcac

SEQ ID NO: 551 - DNA, 44 bp, Artificial Sequence
  Artificial DNA primer
tttgttttttgttttcttctaattgattttttctttctatttcc

SEQ ID NO: 552 - DNA, 50 bp, Saccharomyces cerevisiae
accaaaggaaatagaaagaaaaaatcaattagaagaaaacaaaaaacaaa

SEQ ID NO: 553 - DNA, 50 bp, Saccharomyces cerevisiae
acagaagacgggagacactagcacacaactttaccaggcaaggtatttga

SEQ ID NO: 554 - DNA, 750 bp, Saccharomyces cerevisiae
acagaagacgggagacactagcacacaactttaccaggcaaggtatttgacgctagcatgtgtccaattcagtgtcatttatgattttttgtagtaggatataaatatatacagcgctccaaatagtgcggttgccccaaaaacaccacggaacctcatctgttctcgtactttgttgtgacaaagtagctcactgccttattatcacattttcattatgcaacgcttcggaaaatacgatgttgaaaatcaactcagaagtttgacagcaagcaagttcatcattcgaactagccttattgttttagttcagtgacagcgaactgccgtactcgatgctttatttctcacggtagagcggaagaacagataggggcagcgtgagaagagttagaaagtaaatttttatcacgtctgaagtattcttattcataggaaattttgcaaggttttttagctcaataacgggctaagttatataaggtgttcacgcgattttcttgttatgtatacctcttctctgaggaatggtactactgtcctgatgtaggctccttaaattggtgggcaagaataacttatcgatattttgtatattggtcttggagttcaccacgtaatgcctgtttaagaccatcagttaactctagtattatttggtcttggctactggccgtttgctattattcaagtcttttgtgccttcccgtcgggtaagggagttatttagggatacagaatctaacgaaa

SEQ ID NO: 555 - DNA, 21 bp, Artificial Sequence
  Artificial DNA primer
acagaagacgggagacactag

SEQ ID NO: 556 - DNA, 31 bp, Artificial Sequence
  Artificial DNA primer
tttcgttagattctgtatccctaaataactc

SEQ ID NO: 557 - DNA, 1460 bp, Torulaspora microellipsoides
tttattttttacttatattgctggtagggtaaaaaaatataactcctaggaataggttgtctatatgtttttgtcttgcttctataattgtaacaaacaaggaaagggaaaatactgggtgtaaaagccattgagtcaagttaggtcatcccttttatacaaaatttttcaattttttttccaagattcttgtacgattaattattttttttttgcgtcctacagcgtgatgaaaatttcgcctgctgcaagatgagcgggaacgggcgaaatgtgcacgcgcacaacttacgaaacgcggatgagtcactgacagccaccgcagaggttctgactcctactgagctctattggaggtggcagaaccggtaccggaggagaccgctataaccggtttgaaactgaggcggaagcatttgagccatcgatcagaaaaaaaagaaagtcgtcatcagtcgtgctgtctacgtccacaatgtcaaaaactcaaatgttggtgtaaggttggctgataacgttatcgaccaagttgggaaacttgtgcacggtagtgtgaatccacagttaaactatttaccatgcctgaagtgcattgggtgagctaccttggaaatattgagtttaagctgacacatatgaaaataggaagcttctcaaagaacattgataacataatgaacctgtctaagaatatcctgcagaggatcagctgtgggctgtcgatatgagctcaaatagtgtacgattggcacatttgaagcatacagccttcttctggatctcgtcgagtgataattcttggtagtgtctcgcttgacacatagacacggcaccaattttacacagagccgtcttttttcggaatctccgttattgtaacttttctttttttcagcttttccgtatatgctcgaggatcaaactgtggcaaatcaagaaatatgtcacggaaaagcattcgcagaaacccgtaaaaaccgcatgatgctgtcacagcacttttcttttagcaagtgtgatctcatgtaaagtgttgaaagcctgtgccgctgtttttttctcccggggggtcttggtgccattctgctatcgcgcggtccgtgagatttttgttatttttctagaatacacacttcggtaaattgactgagcacaccatatcacgccaagaaaagcagcgataaaagctgtcaatataaaatgtgtcaatattctggttcacatgagaaaacttcgactaaagcttgtcgcaaatccacgtaaactaaagcgcagcgtagcatccaaaacatatactatagtaaggacagatacctcaatttcaaatagaaactatagttcttgcttaacgataacagtctattccatttgactgaagaaaaaaaaatttattactgaagatgtcaaagctcatccctatcgctagtcctgccctatcgatgatgacatcgagggcttat

SEQ ID NO: 558 - DNA, 1459 bp, Torulaspora microellipsoides
tttattttttacttatattgctggtagggtaaaaaaatataactcctaggaataggttgtctatatgtttttgtcttgcttctataattgtaacaaacaaggaaagggaaaatactgggtgtaaaagccattgagtcaagttaggtcatcccttttatacaaaatttttcaattttttttccaagattcttgtacgattaattattttttttttgcgtcctacagcgtgatgaaaatttcgcctgctgcaagatgagcgggaacgggcgaaatgtgcacgcgcacaacttacgaaacgcggatgagtcactgacagccaccgcagaggttctgactcctactgagctctattggaggtggcagaaccggtaccggaggagaccgctataaccggtttgaacatggaaggatgttttgataagaccggatgacgtgtacgcgaaagatatcaagtagttacgaatacacagttacccacgactgcactttattggatgagcgacgctgaacttaatgtgacacatatgaaaaagggagcctcaagaaatattcttagtgtcgtggatctgcccaagaggattttgcagcggacctgctttcggccatctataagcgctcagatagcaactttttgcaacatagacttattccgggcgggatctcatcatgtcattttcttggcacaatctcgcttgacacatccacacggcaccatttttcagaaatttctcactcatcggaatttttggtatcgtgccccgagatcgtcctttcttttttatctttccagtgctcgagaatcaaactgtggaaaactgagaaaatgtgtcacggaaaagcggataagattgctacattttactaaaaagttgtaaaaaccgcatgatgctgtcaaaatcgcttttctaaaaaagtgtcgaatcttatctttgatagatgtagaatttcaaaggttgcaggtctgtgatgtttgttttccttcctaggggcttttgagtgcgattttgcgaactctcagtctcgttgactatctgttatctttctagattacaacttggtaaaagcgataatgagcacacgatatctaaggaagtggggcagccaagaagaaaacaagacactgtgaaggatgctgtcaaaaaaggacaagataacgagaagatacagccaagacaaaaaaaaaaacgatgaaaggtgtcagtataaaatgtgtcaataatcgtatatacataagcattattccattaaaactagtcacaaatatacaagaactaaacagcagtgtagcatcctcaatatacacaataataagcttaatcgcaatttcgaaactataatttttccgtaacgacaatacgacgttccattcgactgaaaaaaaaaatatttatcgctgaagatgtcaaaacttgtccctatcgctagtcctaacctatcgatgatgacatcgagggcctac

SEQ ID NO: 559 - DNA, 26 bp, Artificial Sequence
  Artificial DNA primer
atgtcaaagctcatccctatcgctag

SEQ ID NO: 560 - DNA, 29 bp, Artificial Sequence
  Artificial DNA primer
tcaaataccttgcctggtaaagttgtgtg

SEQ ID NO: 561 - DNA, 28 bp, Artificial Sequence
  Artificial DNA primer
atgtcaaaacttgtccctatcgctagtc
